(19) United States
(12) Patent Application Publication
(10) Pub. No.: US 2007/0259375 A1
(43) Pub. Date: Nov. 8, 2007

(54) Biomarkers and Methods for Determining Sensitivity to Epidermal Growth Factor Receptor Modulators in Non-Small Cell Lung Cancer

(75) Inventors: Shirin K. Ford, Princeton, NJ (US); Nancy-Anne Perkins, Lawrenceville, NJ (US); Donald G. Jackson, Lawrenceville, NJ (US); Shirin K. Ford, Princeton, NJ (US); Nancy-Anne Perkins, Lawrenceville, NJ (US); Donald G. Jackson, Lawrenceville, NJ (US)

Correspondence Address: LOUIS J. WILLE;BRISTOL-MYERS SQUIBB COMPANY, PATENT DEPARTMENT, P O BOX 4000, PRINCETON, NJ, 08543-4000, US

(73) Assignee: Bristol-Myers Squibb Company

(21) Appl. No.: 10/594,211

(22) PCT Filed: Mar. 28, 2005
(86) PCT No.: PCT/US05/10454

§ 371 Date: Jun. 21, 2007

Related U.S. Application Data
(60) Provisional application No. 60/556,903, filed on Mar. 26, 2004.

(51) Int. Cl. G01N 33/53

(52) U.S. Cl. 435/7.1

(57) ABSTRACT

EGFR biomarkers useful in a method for identifying a mammal that will respond therapeutically to a method of treating cancer comprising administering an EGFR modulator, wherein the method comprises (a) exposing a biological sample from the mammal to the EGFR modulator and (b) measuring in the biological sample the level of the at least one biomarker, wherein a difference in the level of the at least one biomarker measured in (b) compared to the level of the biomarker in a mammal that has not been exposed to the EGFR modulator indicates that the mammal will respond therapeutically to the method of treating cancer.

### SEQUENCE LISTING:

[0001] A compact disc labeled “Copy 1” contains the Sequence Listing as 10219 PCT.ST25.txt. The Sequence Listing is 1452 KB in size and was recorded Mar. 24, 2005. The compact disk is 1 of 2 compact disks. A duplicate copy of the compact disc is labeled “Copy 2” and is 2 of 2 compact discs.

[0002] The compact disc and duplicate copy are identical and are hereby incorporated by reference into the present application.

### FIELD OF THE INVENTION

[0003] The present invention relates generally to the field of pharmacogenomics, and more specifically to methods and procedures to determine drug sensitivity in patients to allow the identification of individualized genetic profiles which will aid in treating diseases and disorders.

### BACKGROUND OF THE INVENTION

[0004] Cancer is a disease with extensive histoclinical heterogeneity. Although conventional histological and clinical features have been correlated to prognosis, the same apparent prognostic type of tumors varies widely in its responsiveness to therapy and consequent survival of the patient.

[0005] New prognostic and predictive markers, which would facilitate an individualization of therapy for each patient, are needed to accurately predict patient response to treatments, such as small molecule or biological molecule drugs, in the clinic. The problem may be solved by the identification of new parameters that could better predict the patient's sensitivity to treatment. The classification of patient samples is a crucial aspect of cancer diagnosis and treatment. The association of a patient's response to a treatment with molecular and genetic markers can open up new opportunities for treatment development in non-responding patients, or distinguish a treatment's indication among other treatment choices because of higher confidence in the efficacy. Further, the pre-selection of patients who are likely to respond well to a medicine, drug, or combination therapy may reduce the number of patients needed in a clinical study or accelerate the time needed to complete a clinical development program (M. Cockett et al., 2000, Current Opinion in Biotechnology, 11:602-609).

[0006] The ability to predict drug sensitivity in patients is particularly challenging because drug responses reflect not only properties intrinsic to the target cells, but also a host's metabolic properties. Efforts to use genetic information to predict drug sensitivity have primarily focused on individual genes that have broad effects, such as the multidrug resistance genes, mdr1 and mrp1 (P. Solmeveld, 2000, J. Intern. Med., 247:521-534).

[0007] The development of microarray technologies for large scale characterization of gene mRNA expression pattern has made it possible to systematically search for molecular markers and to categorize cancers into distinct subgroups not evident by traditional histopathological methods (J. Khan et al., 1998, Cancer Res., 58:5009-5013; A. A. Alizadeh et al., 2000, Nature, 403:503-511; M. Bittner et al., 2000, Nature, 406:536-540; J. Khan et al., 2001, Nature Medicine, 7(6):673-679; and T. R. Golub et al., 1999, Science, 286:531-537; U. Alon et al., 1999, Proc. Natl. Acad. Sci. USA, 96:6745-6750). Such technologies and molecular tools have made it possible to monitor the expression level of a large number of transcripts within a cell population at any given time (see, e.g., Schena et al., 1995, Science, 270:467-470; Lockhart et al., 1996, Nature Biotechnology, 14:1675-1680; Blanchard et al., 1996, Nature Biotechnology, 14:1649; U.S. Pat. No. 5,569,588 to Ashby et al.).

[0008] Recent studies demonstrate that gene expression information generated by microarray analysis of human tumors can predict clinical outcome (L. J. van't Veer et al., 2002, Nature, 415:530-536; T. Sorlie et al., 2001, Proc. Natl. Acad. Sci. USA, 98:10869-10874; M. Shipp et al., 2002, Nature Medicine, 8(1):68-74: G. Glinsky et al., 2004, The Journal of Clin. Invest., 113(6):913-923). These findings bring hope that cancer treatment will be vastly improved by better predicting the response of individual tumors to therapy.

[0009] Needed are new and alternative methods and procedures to determine drug sensitivity in patients to allow the development of individualized genetic profiles which are necessary to treat diseases and disorders based on patient response at a molecular level.

### SUMMARY OF THE INVENTION

[0010] The invention provides methods and procedures for determining patient sensitivity to one or more Epidermal Growth Factor Receptor (EGFR) modulators. The invention also provides methods of determining or predicting whether an individual requiring therapy for a disease state such as cancer will or will not respond to treatment, prior to administration of the treatment, wherein the treatment comprises of one or more EGFR modulators. The one or more EGFR modulators are compounds that can be selected from, for example, one or more EGFR-specific ligands, one or more small molecule EGFR inhibitors, or one or more EGFR binding monoclonal antibodies.

[0011] In one aspect, the invention provides a method for identifying a mammal that will respond therapeutically to a method of treating cancer comprising administering of an EGFR modulator, wherein the method comprises: (a) measuring in the mammal the level of at least one biomarker selected from the biomarkers of Table 1; (b) exposing a biological sample from the mammal to the EGFR modulator; (c) following the exposing in step (b), measuring in said biological sample the level of the at least one biomarker, wherein a difference in the level of the at least one biomarker measured in step (c) compared to the level of the at least one biomarker measured in step (a) indicates that the mammal will respond therapeutically to the said method of treating cancer.

[0012] A difference in the level of the biomarker that is sufficient to indicate whether the mammal will or will not respond therapeutically to the method of treating cancer can be readily determined by one of skill in the art using known techniques. The increase or decrease in the level of the biomarker can be correlated to determine whether the difference is sufficient to identify a mammal that will respond therapeutically. The difference in the level of the biomarker that is sufficient can, in one aspect, be predetermined prior to determining whether the mammal will respond therapeutically to the treatment. In one aspect, the difference in the level of the biomarker is a difference in the mRNA level (measured, for example, by RT-PCT or a microarray), such as at least a two-fold difference, at least a three-fold difference, or at least a four-fold difference in the level of expression. In another aspect, the difference in the level of the biomarker is determined by IHC. In another aspect, the difference in the level of the biomarker refers to a p-value of <0.05 in Anova analysis. In yet another aspect, the difference is determined in an ELISA assay.

[0013] As used herein, respond therapeutically refers to the alleviation or abrogation of the cancer. This means that the life expectancy of an individual affected with the cancer will be increased or that one or more of the symptoms of the cancer will be reduced or ameliorated. The term encompasses a reduction in cancerous cell growth or tumor volume. Whether a mammal responds therapeutically can be measured by many methods well known in the art, such as PET imaging.

[0014] The mammal can be, for example, a human, rat, mouse, dog, rabbit, pig sheep, cow, horse, cat, primate, or monkey.

[0015] The method of the invention can be, for example, an in vitro method wherein the step of measuring in the mammal the level of at least one biomarker comprises taking a biological sample from the mammal and then measuring the level of the at least one biomarker in the biological sample. The biological sample can comprise, for example, at least one of serum, whole fresh blood, peripheral blood mononuclear cells, frozen whole blood, fresh plasma, frozen plasma, urine, saliva, skin, hair follicle, bone marrow, or tumor tissue.

[0016] The level of the at least one biomarker can be, for example, the level of protein and/or mRNA transcript of the at least one biomarker.

[0017] In another aspect, the invention provides a method for identifying a mammal that will respond therapeutically to a method of treating cancer comprising administering an EGFR modulator, wherein the method comprises: (a) exposing a biological sample from the mammal to the EGFR modulator; (b) following the exposing of step (a), measuring in said biological sample the level of at least one biomarker selected from the biomarkers of Table 1, wherein a difference in the level of the at least one biomarker measured in step (b), compared to the level of the at least one biomarker in a mammal that has not been exposed to said EGFR modulator, indicates that the mammal will respond therapeutically to said method of treating cancer.

[0018] In yet another aspect, the invention provides a method for testing or predicting whether a mammal will respond therapeutically to a method of treating cancer comprising administering an EGFR modulator, wherein the method comprises: (a) measuring in the mammal the level of at least one biomarker selected from the biomarkers of Table 1; (b) exposing the mammal to the EGFR modulator; (c) following the exposing of step (b), measuring in the mammal the level of the at least one biomarker, wherein a difference in the level of the at least one biomarker measured in step (c) compared to the level of the at least one biomarker measured in step (a) indicates that the mammal will respond therapeutically to said method of treating cancer.

[0019] In another aspect, the invention provides a method for determining whether a compound inhibits EGFR activity in a mammal, comprising: (a) exposing the mammal to the compound; and (b) following the exposing of step (a), measuring in the mammal the level of at least one biomarker selected from the biomarkers of Table 1, wherein a difference in the level of said biomarker measured in step (b), compared to the level of the biomarker in a mammal that has not been exposed to said compound, indicates that the compound inhibits EGFR activity in the mammal.

[0020] In yet another aspect, the invention provides a method for determining whether a mammal has been exposed to a compound that inhibits EGFR activity, comprising (a) exposing the mammal to the compound; and (b) following the exposing of step (a), measuring in the mammal the level of at least one biomarker selected from the biomarkers of Table 1, wherein a difference in the level of said biomarker measured in step (b), compared to the level of the biomarker in a mammal that has not been exposed to said compound, indicates that the mammal has been exposed to a compound that inhibits EGFR activity.

[0021] In another aspect, the invention provides a method for determining whether a mammal is responding to a compound that inhibits EGFR activity, comprising (a) exposing the mammal to the compound; and (b) following the exposing of step (a), measuring in the mammal the level of at least one biomarker selected from the biomarkers of Table 1, wherein a difference in the level of the at least one biomarker measured in step (b), compared to the level of the at least one biomarker in a mammal that has not been exposed to said compound, indicates that the mammal is responding to the compound that inhibits EGFR activity.

[0022] As used herein, “responding” encompasses responding by way of a biological and cellular response, as well as a clinical response (such as improved symptoms, a therapeutic effect, or an adverse event), in a mammal.

[0023] The invention also provides an isolated biomarker selected from the biomarkers of Table 1. The biomarkers of the invention comprise sequences selected from the nucleotide and amino acid sequences provided in Table 1 and the Sequence Listing, as well as fragments and variants thereof.

[0024] The invention also provides a biomarker set comprising two or more biomarkers selected from the biomarkers of Table 1.

[0025] The invention also provides kits for determining or predicting whether a patient would be susceptible or resistant to a treatment that comprises one or more EGFR modulators. The patient may have a cancer or tumor such as, for example, a non-small cell lung cancer (NSCLC) or tumor.

[0026] In one aspect, the kit comprises a suitable container that comprises one or more specialized microarrays of the invention, one or more EGFR modulators for use in testing cells from patient tissue specimens or patient samples, and instructions for use. The kit may further comprise reagents or materials for monitoring the expression of a biomarker set at the level of mRNA or protein.

[0027] In another aspect, the invention provides a kit comprising two or more biomarkers selected from the biomarkers of Table 1.

[0028] In yet another aspect, the invention provides a kit comprising at least one of an antibody and a nucleic acid for detecting the presence of at least one of the biomarkers selected from the biomarkers of Table 1. In one aspect, the kit further comprises instructions for determining whether or not a mammal will respond therapeutically to a method of treating cancer comprising administering a compound that inhibits EGFR activity. In another aspect, the instructions comprise the steps of (a) measuring in the mammal the level of at least one biomarker selected from the biomarkers of Table 1, (b) exposing the mammal to the compound, (c) following the exposing of step (b), measuring in the mammal the level of the at least one biomarker, wherein a difference in the level of the at least one biomarker measured in step (c) compared to the level of the at least one biomarker measured in step (a) indicates that the mammal will respond therapeutically to said method of treating cancer.

[0029] The invention also provides screening assays for determining if a patient will be susceptible or resistant to treatment with one or more EGFR modulators.

[0030] The invention also provides a method of monitoring the treatment of a patient having a disease, wherein said disease is treated by a method comprising administering one or more EGFR modulators.

[0031] The invention also provides individualized genetic profiles which are necessary to treat diseases and disorders based on patient response at a molecular level.

[0032] The invention also provides specialized microarrays, e.g., oligonucleotide microarrays or cDNA microarrays, comprising one or more biomarkers having expression profiles that correlate with either sensitivity or resistance to one or more EGFR modulators.

[0033] The invention also provides antibodies, including polyclonal or monoclonal, directed against one or more biomarkers of the invention.

[0034] The invention will be better understood upon a reading of the detailed description of the invention when considered in connection with the accompanying figures.

### BRIEF DESCRIPTION OF THE FIGURES

[0035] FIG. 1 illustrates the scheme used for identifying the Table 1 biomarkers.

[0036] FIG. 2 illustrates the scheme used for identifying the Table 2 biomarkers.

[0037] FIG. 3 shows the mRNA levels of EGFR determined by expression profiling of fourteen NSCLC cell lines.

[0038] FIG. 4 illustrates the variance analysis of expression profiles.

[0039] FIG. 5 illustrates the variance metric distribution of probe sets for the adenocarcinoma tumors.

[0040] FIG. 6 illustrates the variance metric distribution of probe sets for the cell lines.

[0041] FIG. 7 illustrates the scoring of staining of a Calgranulin B IHC Assay.

### DETAILED DESCRIPTION OF THE INVENTION

[0042] Identification of biomarkers that provide rapid and accessible readouts of efficacy, drug exposure, or clinical response is increasingly important in the clinical development of drug candidates. Embodiments of the invention include measuring changes in the levels of secreted proteins, or plasma biomarkers, which represent one category of biomarker. In one aspect, plasma samples, which represent a readily accessible source of material, serves a surrogate tissue for biomarker analysis.

[0043] The invention provides biomarkers that respond to the modulation of a specific signal transduction pathway and also correlate with EGFR modulator sensitivity or resistance. These biomarkers can be employed for predicting response to one or more EGFR modulators. In one aspect, the biomarkers of the invention are those provided in Table 1 and the Sequence Listing, including both polynucleotide and polypeptide sequences.

TABLE 1
Biomarkers

| Unigene title and | | Affymetrix |
|---|---|---|
| SEQ ID NO: | Affymetrix Description | Probe Set |
| S100A14: S100 | gb: NM_020672.1 /DEF = Homo sapiens S100- | 218677_at |
| calcium binding | type calcium binding protein A14 (LOC57402), | |
| protein A14 | mRNA. /FEA = mRNA /GEN = LOC57402 | |
| (LOC57402) | /PROD = S100-type calcium binding protein | |
| SEQ ID NOS: 1 | A14 /DB_XREF = gi: 10190711 /UG = Hs.288998 | |
| (DNA) and 148 | S100-type calcium binding protein A14 | |
| (amino acid) | /FL = gb: NM_020672.1 gb: BC005019.1 | |
| | gb: AY007220.1 | |
| JTB: jumping | gb: AF151056.1 /DEF = Homo sapiens HSPC222 | 210434_x_at |
| translocation | mRNA, complete cds. /FEA = mRNA | |
| breakpoint | /PROD = HSPC222 /DB_XREF = gi: 7106833 | |
| (LOC10899) | /UG = Hs.323093 Homo sapiens , jumping | |
| SEQ ID NOS: 2 | translocation breakpoint, clone MGC: 10274, | |
| (DNA) and 149 | mRNA, complete cds /FL = gb: AF151056.1 | |
| (amino acid) | | |
| CDH1: cadherin 1, | gb: NM_004360.1 /DEF = Homo sapiens | 201131_s_at |
| type 1 preproprotein | cadherin 1, type 1, E-cadherin (epithelial) | |
| (LOC999) | (CDH1), mRNA. /FEA = mRNA /GEN = CDH1 | |
| SEQ ID NOS: 3 | /PROD = cadherin 1, type 1, E-cadherin | |
| (DNA) and 150 | (epithelial) /DB_XREF = gi: 4757959 | |
| (amino acid) | /UG = Hs.194657 cadherin 1, type 1, E-cadherin | |
| | (epithelial) /FL = gb: L08599.1 gb: NM_004360.1 | |
| CYR61: cysteine- | gb: NM_001554.1 /DEF = Homo sapiens | 201289_at |
| rich, angiogenic | cysteine-rich, angiogenic inducer, 61 (CYR61), | |
| inducer, 61 | mRNA. /FEA = mRNA /GEN = CYR61 | |
| (LOC3491) | /PROD = cysteine-rich, angiogenic inducer, 61 | |
| SEQ ID NOS: 4 | /DB_XREF = gi: 4504612 /UG = Hs.8867 | |
| (DNA) and 151 | cysteine-rich, angiogenic inducer, 61 | |
| (amino acid) | /FL = gb: BC001271.1 gb: U62015.1 | |
| | gb: AF003594.1 gb: AF031385.1 | |
| | gb: NM_001554.1 | |
| TGFBI: transforming | gb: NM_000358.1 /DEF = Homo sapiens | 201506_at |
| growth factor, beta- | transforming growth factor, beta-induced, 68 kD | |
| induced, 68 kDa | (TGFBI), mRNA. /FEA = mRNA | |
| (LOC7045) | /GEN = TGFBI /PROD = transforming growth | |
| SEQ ID NOS: 5 | factor, beta-induced, 68 kD | |
| (DNA) and 152 | /DB_XREF = gi: 4507466 /UG = Hs.118787 | |
| (amino acid) | transforming growth factor, beta-induced, 68 kD | |
| | /FL = gb: BC000097.1 gb: BC004972.1 | |
| | gb: M77349.1 gb: NM_000358.1 | |
| PSPHL: | Consensus includes gb: BF968134 /FEA = EST | 212509_s_at |
| phosphoserine | /DB_XREF = gi: 12335349 | |
| phosphatase-like | /DB_XREF = est: 602269121F1 | |
| (LOC8781) | /CLONE = IMAGE: 4357349 /UG = Hs.250723 | |
| SEQ ID NOS: 6 | FK506 binding protein 12-rapamycin associated | |
| (DNA) and 153 | protein 1 | |
| (amino acid) | | |
| DKK1: dickkopf | gb: NM_012242.1 /DEF = Homo sapiens | 204602_at |
| homolog 1 | dickkopf (Xenopus laevis) homolog 1 (DKK1), | |
| (LOC22943) | mRNA. /FEA = mRNA /GEN = DKK1 | |
| SEQ ID NOS: 7 | /PROD = dickkopf (Xenopus laevis) homolog 1 | |
| (DNA) and 154 | /DB_XREF = gi: 7110718 /UG = Hs.40499 | |
| (amino acid) | dickkopf (Xenopus laevis) homolog 1 | |
| | /FL = gb: AF127563.1 gb: AF177394.1 | |
| | gb: NM_012242.1 | |
| FHL1: four and a half | gb: NM_001449.1 /DEF = Homo sapiens four | 201540_at |
| LIM domains 1 | and a half LIM domains 1 (FHL1), mRNA. | |
| (LOC2273) | /FEA = mRNA /GEN = FHL1 /PROD = four and a | |
| SEQ ID NOS: 8 | half LIM domains 1 /DB_XREF = gi: 4503720 | |
| (DNA) and 155 | /UG = Hs.239069 four and a half LIM domains 1 | |
| (amino acid) | /FL = gb: U29538.1 gb: U60115.1 | |
| | gb: NM_001449.1 | |
| SSR4: signal | gb: NM_006280.1 /DEF = Homo sapiens signal | 201004_at |
| sequence receptor, | sequence receptor, delta (translocon-associated | |
| delta (LOC6748) | protein delta) (SSR4), mRNA. /FEA = mRNA | |
| SEQ ID NOS: 9 | /GEN = SSR4 /PROD = signal sequence receptor, | |
| (DNA) and 156 | delta /DB_XREF = gi: 5454089 /UG = Hs.102135 | |
| (amino acid) | signal sequence receptor, delta (translocon- | |
| | associated protein delta) /FL = gb: BC003371.1 | |
| | gb: NM_006280.1 | |
| S100A9: S100 | gb: NM_002965.2 /DEF = Homo sapiens S100 | 203535_at |
| calcium-binding | calcium-binding protein A9 (calgranulin B) | |
| protein A9 | (S100A9), mRNA. /FEA = mRNA | |
| (LOC6280) | /GEN = S100A9 /PROD = S100 calcium-binding | |
| SEQ ID NOS: 10 | protein A9 /DB_XREF = gi: 9845520 | |
| (DNA) and 157 | /UG = Hs.112405 S100 calcium-binding protein | |
| (amino acid) | A9 (calgranulin B) /FL = gb: M26311.1 | |
| | gb: NM_002965.2 | |
| SFN: stratifin | Cluster Incl. X57348: H. sapiens mRNA (clone | 33322_i_at |
| (LOC2810) | 9112) /cds = (165, 911) /gb = X57348 /gi = 23939 | |
| SEQ ID NOS: 11 | /ug = Hs.184510 /len = 1407 | |
| (DNA) and 158 | | |
| (amino acid) | | |
| F2RL1: coagulation | Consensus includes gb: BE965369 /FEA = EST | 213506_at |
| factor II (thrombin) | /DB_XREF = gi: 11769659 | |
| receptor-like 1 | /DB_XREF = est: 601659282R1 | |
| precursor (LOC2150) | /CLONE = IMAGE: 3895653 /UG = Hs.168102 | |
| SEQ ID NOS: 12 | Human proteinase activated receptor-2 mRNA, | |
| (DNA) and 159 | 3UTR | |
| (amino acid) | | |
| SPUVE: protease, | gb: NM_007173.1 /DEF = Homo sapiens | 202458_at |
| serine, 23 precursor | protease, serine, 23 (SPUVE), mRNA. | |
| (LOC11098) | /FEA = mRNA /GEN = SPUVE /PROD = protease, | |
| SEQ ID NOS: 13 | serine, 23 /DB_XREF = gi: 6005881 | |
| (DNA) and 160 | /UG = Hs.325820 protease, serine, 23 | |
| (amino acid) | /FL = gb: AL136914.1 gb: BC001278.1 | |
| | gb: AF015287.1 gb: NM_007173.1 | |
| | gb: AF193611.1 | |
| AMIGO2: | Consensus includes gb: AC004010 | 222108_at |
| amphoterin induced | /DEF = Human BAC clone GS1-99H8 | |
| gene 2 (LOC347902) | /FEA = CDS /DB_XREF = gi: 2781385 | |
| SEQ ID NOS: 14 | /UG = Hs.121520 Human BAC clone GS1-99H8 | |
| (DNA) and 161 | | |
| (amino acid) | | |
| KRT7: keratin 7 | gb: BC002700.1 /DEF = Homo sapiens , Similar | 209016_s_at |
| (LOC3855) | to keratin 7, clone MGC: 3625, mRNA, | |
| SEQ ID NOS: 15 | complete cds. /FEA = mRNA /PROD = Similar to | |
| (DNA) and 162 | keratin 7 /DB_XREF = gi: 12803726 | |
| (amino acid) | /UG = Hs.23881 keratin 7 /FL = gb: BC002700.1 | |
| | gb: NM_005556.1 | |
| RPL13: ribosomal | Consensus includes gb: AW574664 /FEA = EST | 212191_x_at |
| protein L13 | /DB_XREF = gi: 7246203 /DB_XREF = est: UI- | |
| (LOC6137) | HF-BL0-abw-d-10-0-UI.s1 | |
| SEQ ID NOS: 16 | /CLONE = IMAGE: 3057859 /UG = Hs.180842 | |
| (DNA) and 163 | ribosomal protein L13 | |
| (amino acid) | | |
| AF1Q: AF1Q protein | gb: BC006471.1 /DEF = Homo sapiens , ALL1- | 211071_s_at |
| (LOC10962) | fused gene from chromosome 1q, clone | |
| SEQ ID NOS: 17 | MGC: 4013, mRNA, complete cds. | |
| (DNA) and 164 | /FEA = mRNA /PROD = ALL1-fused gene from | |
| (amino acid) | chromosome 1q /DB_XREF = gi: 13623686 | |
| | /FL = gb: BC006471.1 | |
| COL6A2: alpha 2 | gb: AY029208.1 /DEF = Homo sapiens type VI | 209156_s_at |
| type VI collagen | collagen alpha 2 chain precursor (COL6A2) | |
| isoform 2C2 | mRNA, complete cds, alternatively spliced. | |
| precursor (LOC1292) | /FEA = mRNA /GEN = COL6A2 /PROD = type VI | |
| SEQ ID NOS: 18 | collagen alpha 2 chain precursor | |
| (DNA) and 165 | /DB_XREF = gi: 13603393 /UG = Hs.159263 | |
| (amino acid) | collagen, type VI, alpha 2 /FL = gb: AY029208.1 | |
| COL6A1: collagen, | Consensus includes gb: AA292373 /FEA = EST | 213428_s_at |
| type VI, alpha 1 | /DB_XREF = gi: 1940353 | |
| precursor (LOC1291) | /DB_XREF = est: zt51a09.s1 | |
| SEQ ID NOS: 19 | /CLONE = IMAGE: 725848 /UG = Hs.108885 | |
| (DNA) and 166 | collagen, type VI, alpha 1 | |
| (amino acid) | | |
| SLC38A2: solute | gb: NM_018573.1 /DEF = Homo sapiens | 218041_x_at |
| carrier family 38, | hypothetical protein PRO1068 (PRO1068), | |
| member 2 | mRNA. /FEA = mRNA /GEN = PRO1068 | |
| (LOC54407) | /PROD = hypothetical protein PRO1068 | |
| SEQ ID NOS: 20 | /DB_XREF = gi: 8924006 /UG = Hs.321158 | |
| (DNA) and 167 | hypothetical protein PRO1068 | |
| (amino acid) | /FL = gb: AF116620.1 gb: NM_018573.1 | |
| PAPSS2: 3′- | gb: AF074331.1 /DEF = Homo sapiens PAPS | 203060_s_at |
| phosphoadenosine 5′- | synthetase-2 (PAPSS2) mRNA, complete cds. | |
| phosphosulfate | /FEA = mRNA /GEN = PAPSS2 /PROD = PAPS | |
| synthase 2 | synthetase-2 /DB_XREF = gi: 5052074 | |
| (LOC9060) | /UG = Hs.274230 3-phosphoadenosine 5- | |
| SEQ ID NOS: 21 | phosphosulfate synthase 2 /FL = gb: AF150754.2 | |
| (DNA) and 168 | gb: AF313907.1 gb: AF091242.1 | |
| (amino acid) | gb: NM_004670.1 gb: AF074331.1 | |
| | gb: AF173365.1 | |
| JAG1: jagged 1 | gb: U73936.1 /DEF = Homo sapiens Jagged 1 | 209099_x_at |
| precursor (LOC182) | (HJ1) mRNA, complete cds. /FEA = mRNA | |
| SEQ ID NOS: 22 | /GEN = HJ1 /PROD = Jagged 1 | |
| (DNA) and 169 | /DB_XREF = gi: 1695273 /UG = Hs.91143 jagged | |
| (amino acid) | 1 (Alagille syndrome) /FL = gb: U61276.1 | |
| | gb: U73936.1 gb: AF003837.1 gb: AF028593.1 | |
| | gb: NM_000214.1 | |
| RPS27L: ribosomal | gb: NM_015920.1 /DEF = Homo sapiens 40S | 218007_s_at |
| protein S27-like | ribosomal protein S27 isoform (LOC51065), | |
| protein (LOC51065) | mRNA. /FEA = mRNA /GEN = LOC51065 | |
| SEQ ID NOS: 23 | /PROD = 40S ribosomal protein S27 isoform | |
| (DNA) and 170 | /DB_XREF = gi: 7705705 /UG = Hs.108957 40S | |
| (amino acid) | ribosomal protein S27 isoform | |
| | /FL = gb: BC003667.1 gb: AF070668.1 | |
| | gb: NM_015920.1 | |
| PAM: peptidylglycine | gb: NM_000919.1 /DEF = Homo sapiens | 202336_s_at |
| alpha-amidating | peptidylglycine alpha-amidating | |
| monooxygenase | monooxygenase (PAM), mRNA. /FEA = mRNA | |
| isoform a, | /GEN = PAM /PROD = peptidylglycine alpha- | |
| preproprotein | amidating monooxygenase | |
| (LOC5066) | /DB_XREF = gi: 4505602 /UG = Hs.83920 | |
| SEQ ID NOS: 24 | peptidylglycine alpha-amidating | |
| (DNA) and 171 | monooxygenase /FL = gb: M37721.1 | |
| (amino acid) | gb: NM_000919.1 | |
| STAT1: signal | gb: NM_007315.1 /DEF = Homo sapiens signal | 200887_s_at |
| transducer and | transducer and activator of transcription 1, | |
| activator of | 91 kD (STAT1), mRNA. /FEA = mRNA | |
| transcription 1 | /GEN = STAT1 /PROD = signal transducer and | |
| isoform alpha | activator of transcription1, 91 kD | |
| (LOC6772) | /DB_XREF = gi: 6274551 /UG = Hs.21486 signal | |
| SEQ ID NOS: 25 | transducer and activator of transcription 1, | |
| (DNA) and 172 | 91 kD /FL = gb: M97935.1 gb: NM_007315.1 | |
| (amino acid) | | |
| CTSB: cathepsin B | gb: NM_001908.1 /DEF = Homo sapiens | 200839_s_at |
| preproprotein | cathepsin B (CTSB), mRNA. /FEA = mRNA | |
| (LOC1508) | /GEN = CTSB /PROD = cathepsin B | |
| SEQ ID NOS: 26 | /DB_XREF = gi: 4503138 /UG = Hs.297939 | |
| (DNA) and 173 | cathepsin B /FL = gb: M14221.1 gb: L16510.1 | |
| (amino acid) | gb: NM_001908.1 | |
| POLR2L: DNA | gb: BC005903.1 /DEF = Homo sapiens , | 211730_s_at |
| directed RNA | polymerase (RNA) II (DNA directed) | |
| polymerase II | polypeptide L (7.6 kD), clone MGC: 14494, | |
| polypeptide L | mRNA, complete cds. /FEA = mRNA | |
| (LOC5441) | /PROD = polymerase (RNA) II (DNA directed) | |
| SEQ ID NOS: 27 | polypeptide L(7.6 kD) /DB_XREF = gi: 13543491 | |
| (DNA) and 174 | /FL = gb: BC005903.1 | |
| (amino acid) | | |
| ETV1: ets variant | Consensus includes gb: BE881590 /FEA = EST | 221911_at |
| gene 1 (LOC2115) | /DB_XREF = gi: 10330366 | |
| SEQ ID NOS: 28 | /DB_XREF = est: 601490008F1 | |
| (DNA) and 175 | /CLONE = IMAGE: 3892465 /UG = Hs.10684 | |
| (amino acid) | Homo sapiens clone 24421 mRNA sequence | |
| KRT18: keratin 18 | gb: NM_000224.1 /DEF = Homo sapiens keratin | 201596_x_at |
| (LOC3875) | 18 (KRT18), mRNA. /FEA = mRNA | |
| SEQ ID NOS: 29 | /GEN = KRT18 /PROD = keratin 18 | |
| (DNA) and 176 | /DB_XREF = gi: 4557887 /UG = Hs.65114 keratin | |
| (amino acid) | 18 /FL = gb: BC000698.1 gb: BC000180.2 | |
| | gb: BC004253.1 gb: M26326.1 | |
| | gb: NM_000224.1 | |
| RPL29: ribosomal | Consensus includes gb: BF683426 /FEA = EST | 213969_x_at |
| protein L29 | /DB_XREF = gi: 11968834 | |
| (LOC6159) | /DB_XREF = est: 602139603F1 | |
| SEQ ID NOS: 30 | /CLONE = IMAGE: 4300777 /UG = Hs.183698 | |
| (DNA) and 177 | ribosomal protein L29 | |
| (amino acid) | | |
| PYGB: brain | gb: NM_002862.1 /DEF = Homo sapiens | 201481_s_at |
| glycogen | phosphorylase, glycogen; brain (PYGB), | |
| phosphorylase | nuclear gene encoding mitochondrial protein, | |
| (LOC5834) | mRNA. /FEA = mRNA /GEN = PYGB | |
| SEQ ID NOS: 31 | /PROD = phosphorylase, glycogen; brain | |
| (DNA) and 178 | /DB_XREF = gi: 4506350 /UG = Hs.75658 | |
| (amino acid) | phosphorylase, glycogen; brain | |
| | /FL = gb: U47025.1 gb: NM_002862.1 | |
| ALCAM: activated | Consensus includes gb: AA156721 /FEA = EST | 201952_at |
| leukocyte cell | /DB_XREF = gi: 1728335 | |
| adhesion molecule | /DB_XREF = est: zl18b04.s1 | |
| (LOC214) | /CLONE = IMAGE: 502255 /UG = Hs.10247 | |
| SEQ ID NOS: 32 | activated leucocyte cell adhesion molecule | |
| (DNA) and 179 | /FL = gb: NM_001627.1 gb: L38608.1 | |
| (amino acid) | | |
| CTGF: connective | gb: M92934.1 /DEF = Human connective tissue | 209101_at |
| tissue growth factor | growth factor, complete cds. /FEA = mRNA | |
| (LOC1490) | /PROD = connective tissue growth factor | |
| SEQ ID NOS: 33 | /DB_XREF = gi: 180923 /UG = Hs.75511 | |
| (DNA) and 180 | connective tissue growth factor | |
| (amino acid) | /FL = gb: M92934.1 gb: NM_001901.1 | |
| UCHL1: ubiquitin | gb: NM_004181.1 /DEF = Homo sapiens | 201387_s_at |
| carboxyl-terminal | ubiquitin carboxyl-terminal esterase L1 | |
| esterase L1 (ubiquitin | (ubiquitin thiolesterase) (UCHL1), mRNA. | |
| thiolesterase) | /FEA = mRNA /GEN = UCHL1 | |
| (LOC7345) | /PROD = ubiquitin carboxyl-terminal esterase | |
| SEQ ID NOS: 34 | L1(ubiquitin thiolesterase) | |
| (DNA) and 181 | /DB_XREF = gi: 4759283 /UG = Hs.76118 | |
| (amino acid) | ubiquitin carboxyl-terminal esterase L1 | |
| | (ubiquitin thiolesterase) /FL = gb: BC000332.1 | |
| | gb: BC005117.1 gb: NM_004181.1 | |
| C14orf78: | Consensus includes gb: AI935123 /FEA = EST | 212992_at |
| chromosome 14 open | /DB_XREF = gi: 5673993 | |
| reading frame 78 | /DB_XREF = est: wp13h09.x1 | |
| (LOC113146) | /CLONE = IMAGE: 2464769 /UG = Hs.57548 | |
| SEQ ID NOS: 35 | ESTs | |
| (DNA) and 182 | | |
| (amino acid) | | |
| PBEF: pre-B-cell | Consensus includes gb: BF575514 /FEA = EST | 217738_at |
| colony-enhancing | /DB_XREF = gi: 11649318 | |
| factor isoform a | /DB_XREF = est: 602133090F1 | |
| (LOC10135) | /CLONE = IMAGE: 4288079 /UG = Hs.239138 | |
| SEQ ID NOS: 36 | pre-B-cell colony-enhancing factor | |
| (DNA) and 183 | /FL = gb: U02020.1 gb: NM_005746.1 | |
| (amino acid) | | |
| GNG11: guanine | gb: NM_004126.1 /DEF = Homo sapiens guanine | 204115_at |
| nucleotide binding | nucleotide binding protein 11 (GNG11), | |
| protein (G protein), | mRNA. /FEA = mRNA /GEN = GNG11 | |
| gamma 11 | /PROD = guanine nucleotide binding protein 11 | |
| (LOC2791) | /DB_XREF = gi: 4758447 /UG = Hs.83381 | |
| SEQ ID NOS: 37 | guanine nucleotide binding protein 11 | |
| (DNA) and 184 | /FL = gb: NM_004126.1 gb: U31384.1 | |
| (amino acid) | | |
| SERPINE2: | Consensus includes gb: AL541302 /FEA = EST | 212190_at |
| plasminogen activator | /DB_XREF = gi: 12872241 | |
| inhibitor type 1, | /DB_XREF = est: AL541302 | |
| member 2 | /CLONE = CS0DE006YI10 (5 prime) | |
| (LOC5270) | /UG = Hs.21858 trinucleotide repeat containing 3 | |
| SEQ ID NOS: 38 | | |
| (DNA) and 185 | | |
| (amino acid) | | |
| PTTG1IP: pituitary | gb: NM_004339.2 /DEF = Homo sapiens | 200677_at |
| tumor-transforming | pituitary tumor-transforming 1 interacting | |
| gene 1 protein- | protein (PTTG1IP), mRNA. /FEA = mRNA | |
| interacting protein | /GEN = PTTG1IP /PROD = pituitary tumor- | |
| precursor (LOC754) | transforming protein1-interacting protein | |
| SEQ ID NOS: 39 | precursor /DB_XREF = gi: 11038670 | |
| (DNA) and 186 | /UG = Hs.111126 pituitary tumor-transforming 1 | |
| (amino acid) | interacting protein /FL = gb: NM_004339.2 | |
| | gb: BC000415.1 gb: AF149785.1 | |
| KRT19: keratin 19 | gb: NM_002276.1 /DEF = Homo sapiens keratin | 201650_at |
| (LOC3880) | 19 (KRT19), mRNA. /FEA = mRNA | |
| SEQ ID NOS: 40 | /GEN = KRT19 /PROD = keratin 19 | |
| (DNA) and 187 | /DB_XREF = gi: 4504916 /UG = Hs.182265 | |
| (amino acid) | keratin 19 /FL = gb: BC002539.1 | |
| | gb: NM_002276.1 | |
| SFN: stratifin | Cluster Incl. X57348: H. sapiens mRNA (clone | 33323_r_at |
| (LOC2810) | 9112) /cds = (165,911) /gb = X57348 /gi = 23939 | |
| SEQ ID NOS: 41 | /ug = Hs.184510 /len = 1407 | |
| (DNA) and 188 | | |
| (amino acid) | | |
| ICAM1: intercellular | Consensus includes gb: AI608725 /FEA = EST | 202637_s_at |
| adhesion molecule 1 | /DB_XREF = gi: 4617892 | |
| (LOC3383) | /DB_XREF = est: tw90b01.x1 | |
| SEQ ID NOS: 42 | /CLONE = IMAGE: 2266921 /UG = Hs.168383 | |
| (DNA) and 189 | intercellular adhesion molecule 1 (CD54), | |
| (amino acid) | human rhinovirus receptor /FL = gb: M24283.1 | |
| | gb: J03132.1 gb: NM_000201.1 | |
| SLC6A8: solute | gb: NM_005629.1 /DEF = Homo sapiens solute | 202219_at |
| carrier family 6 | carrier family 6 (neurotransmitter transporter, | |
| (neurotransmitter | creatine), member 8 (SLC6A8), mRNA. | |
| transporter, creatine), | /FEA = mRNA /GEN = SLC6A8 /PROD = solute | |
| member 8 | carrier family 6 (neurotransmittertransporter, | |
| (LOC6535) | creatine), member 8 /DB_XREF = gi: 5032096 | |
| SEQ ID NOS: 43 | /UG = Hs.187958 solute carrier family 6 | |
| (DNA) and 190 | (neurotransmitter transporter, creatine), member | |
| (amino acid) | 8 /FL = gb: L31409.1 gb: NM_005629.1 | |
| IL8: interleukin 8 | gb: AF043337.1 /DEF = Homo sapiens | 211506_s_at |
| (LOC3576) | interleukin 8 C-terminal variant (IL8) mRNA, | |
| SEQ ID NOS: 44 | complete cds. /FEA = mRNA /GEN = IL8 | |
| (DNA) and 191 | /PROD = interleukin 8 C-terminal variant | |
| (amino acid) | /DB_XREF = gi: 12641914 /UG = Hs.624 | |
| | interleukin 8 /FL = gb: AF043337.1 | |
| CSPG2: chondroitin | gb: NM_004385.1 /DEF = Homo sapiens | 204620_s_at |
| sulfate proteoglycan 2 | chondroitin sulfate proteoglycan 2 (versican) | |
| (versican) (LOC1462) | (CSPG2), mRNA. /FEA = mRNA | |
| SEQ ID NOS: 45 | /GEN = CSPG2 /PROD = chondroitin sulfate | |
| (DNA) and 192 | proteoglycan 2 (versican) | |
| (amino acid) | /DB_XREF = gi: 4758081 /UG = Hs.81800 | |
| | chondroitin sulfate proteoglycan 2 (versican) | |
| | /FL = gb: NM_004385.1 | |
| CTSC: cathepsin C | gb: NM_001814.1 /DEF = Homo sapiens | 201487_at |
| isoform a | cathepsin C (CTSC), mRNA. /FEA = mRNA | |
| preproprotein | /GEN = CTSC /PROD = cathepsin C | |
| (LOC1075) | /DB_XREF = gi: 4503140 /UG = Hs.10029 | |
| SEQ ID NOS: 46 | cathepsin C /FL = gb: NM_001814.1 | |
| (DNA) and 193 | | |
| (amino acid) | | |
| JTB: jumping | gb: BC004239.1 /DEF = Homo sapiens , jumping | 210927_x_at |
| translocation | translocation breakpoint, clone MGC: 10274, | |
| breakpoint | mRNA, complete cds. /FEA = mRNA | |
| (LOC10899) | /PROD = jumping translocation breakpoint | |
| SEQ ID NOS: 47 | /DB_XREF = gi: 13278986 /UG = Hs.323093 | |
| (DNA) and 194 | Homo sapiens , jumping translocation | |
| (amino acid) | breakpoint, clone MGC: 10274, mRNA, | |
| | complete cds /FL = gb: BC004239.1 | |
| KRT8: keratin 8 | gb: U76549.1 /DEF = Human cytokeratin 8 | 209008_x_at |
| (LOC3856) | mRNA, complete cds. /FEA = mRNA | |
| SEQ ID NOS: 48 | /PROD = cytokeratin 8 /DB_XREF = gi: 1673574 | |
| (DNA) and 195 | /UG = Hs.242463 keratin 8 /FL = gb: BC000654.1 | |
| (amino acid) | gb: U76549.1 gb: M34225.1 gb: M26324.1 | |
| | gb: NM_002273.1 | |
| UGDH: UDP-glucose | gb: NM_003359.1 /DEF = Homo sapiens UDP- | 203343_at |
| dehydrogenase | glucose dehydrogenase (UGDH), mRNA. | |
| (LOC7358) | /FEA = mRNA /GEN = UGDH /PROD = UDP- | |
| SEQ ID NOS: 49 | glucose dehydrogenase | |
| (DNA) and 196 | /DB_XREF = gi: 4507812 /UG = Hs.28309 UDP- | |
| (amino acid) | glucose dehydrogenase /FL = gb: AF061016.1 | |
| | gb: NM_003359.1 | |
| TXNIP: thioredoxin | Consensus includes gb: AA812232 /FEA = EST | 201008_s_at |
| interacting protein | /DB_XREF = gi: 2881843 | |
| (LOC10628) | /DB_XREF = est: ob84h09.s1 | |
| SEQ ID NOS: 50 | /CLONE = IMAGE: 1338113 /UG = Hs.179526 | |
| (DNA) and 197 | upregulated by 1,25-dihydroxyvitamin D-3 | |
| (amino acid) | /FL = gb: NM_006472.1 gb: S73591.1 | |
| CTSB: cathepsin B | gb: NM_001908.1 /DEF = Homo sapiens | 200838_at |
| preproprotein | cathepsin B (CTSB), mRNA. /FEA = mRNA | |
| (LOC1508) | /GEN = CTSB /PROD = cathepsin B | |
| SEQ ID NOS: 51 | /DB_XREF = gi: 4503138 /UG = Hs.297939 | |
| (DNA) and 198 | cathepsin B /FL = gb: M14221.1 gb: L16510.1 | |
| (amino acid) | gb: NM_001908.1 | |
| CSPG2: chondroitin | Consensus includes gb: BF218922 /FEA = EST | 221731_x_at |
| sulfate proteoglycan 2 | /DB_XREF = gi: 11112418 | |
| (versican) (LOC1462) | /DB_XREF = est: 601885091F1 | |
| SEQ ID NOS: 52 | /CLONE = IMAGE: 4103447 /UG = Hs.81800 | |
| (DNA) and 199 | chondroitin sulfate proteoglycan 2 (versican) | |
| (amino acid) | | |
| ANXA10: annexin | gb: AF196478.1 /DEF = Homo sapiens annexin | 210143_at |
| A10 (LOC11199) | 14 (ANX14) mRNA, complete cds. | |
| SEQ ID NOS: 53 | /FEA = mRNA /GEN = ANX14 /PROD = annexin | |
| (DNA) and 200 | 14 /DB_XREF = gi: 6274496 /UG = Hs.188401 | |
| (amino acid) | annexin A10 /FL = gb: AF196478.1 | |
| | gb: NM_007193.2 | |
| SAT: | gb: M55580.1 /DEF = Human | 210592_s_at |
| spermidine/spermine | spermidinespermine N1-acetyltransferase | |
| N1-acetyltransferase | mRNA, complete cds. /FEA = mRNA | |
| (LOC6303) | /GEN = spermidinespermine N1- | |
| SEQ ID NOS: 54 | acetyltransferase /PROD = spermidinespermine | |
| (DNA) and 201 | N1-acetyltransferase /DB_XREF = gi: 338335 | |
| (amino acid) | /UG = Hs.28491 spermidinespermine N1- | |
| | acetyltransferase /FL = gb: M55580.1 | |
| COL6A3: alpha 3 | gb: NM_004369.1 /DEF = Homo sapiens | 201438_at |
| type VI collagen | collagen, type VI, alpha 3 (COL6A3), mRNA. | |
| isoform 1 precursor | /FEA = mRNA /GEN = COL6A3 | |
| (LOC1293) | /PROD = collagen, type VI, alpha 3 | |
| SEQ ID NOS: 55 | /DB_XREF = gi: 4758027 /UG = Hs.80988 | |
| (DNA) and 202 | collagen, type VI, alpha 3 | |
| (amino acid) | /FL = gb: NM_004369.1 | |
| SPARC: secreted | gb: NM_003118.1 /DEF = Homo sapiens secreted | 200665_s_at |
| protein, acidic, | protein, acidic, cysteine-rich (osteonectin) | |
| cysteine-rich | (SPARC), mRNA. /FEA = mRNA | |
| (osteonectin) | /GEN = SPARC /PROD = secreted protein, acidic, | |
| (LOC6678) | cysteine-rich(osteonectin) | |
| SEQ ID NOS: 56 | /DB_XREF = gi: 4507170 /UG = Hs.111779 | |
| (DNA) and 203 | secreted protein, acidic, cysteine-rich | |
| (amino acid) | (osteonectin) /FL = gb: BC004974.1 gb: J03040.1 | |
| | gb: NM_003118.1 | |
| TXNIP: thioredoxin | gb: NM_006472.1 /DEF = Homo sapiens | 201010_s_at |
| interacting protein | upregulated by 1,25-dihydroxyvitamin D-3 | |
| (LOC10628) | (VDUP1), mRNA. /FEA = mRNA | |
| SEQ ID NOS: 57 | /GEN = VDUP1 /PROD = upregulated by 1,25- | |
| (DNA) and 204 | dihydroxyvitamin D-3 /DB_XREF = gi: 5454161 | |
| (amino acid) | /UG = Hs.179526 upregulated by 1,25- | |
| | dihydroxyvitamin D-3 /FL = gb: NM_006472.1 | |
| | gb: S73591.1 | |
| MDK: midkine | gb: M69148.1 /DEF = Human midkine mRNA, | 209035_at |
| (neurite growth- | complete cds. /FEA = mRNA /GEN = hMK-1 | |
| promoting factor 2) | /PROD = midkine /DB_XREF = gi: 182650 | |
| (LOC4192) | /UG = Hs.82045 midkine (neurite growth- | |
| SEQ ID NOS: 58 | promoting factor 2) /FL = gb: M69148.1 | |
| (DNA) and 205 | gb: NM_002391.1 | |
| (amino acid) | | |
| TXNRD1: | gb: NM_003330.1 /DEF = Homo sapiens | 201266_at |
| thioredoxin reductase | thioredoxin reductase 1 (TXNRD1), mRNA. | |
| 1 (LOC7296) | /FEA = mRNA /GEN = TXNRD1 | |
| SEQ ID NOS: 59 | /PROD = thioredoxin reductase 1 | |
| (DNA) and 206 | /DB_XREF = gi: 4507746 /UG = Hs.13046 | |
| (amino acid) | thioredoxin reductase 1 /FL = gb: D88687.1 | |
| | gb: AF077367.1 gb: NM_003330.1 | |
| | gb: AF208018.1 | |
| ARHD: ras homolog | gb: BC001338.1 /DEF = Homo sapiens , ras | 209885_at |
| D (LOC29984) | homolog gene family, member, clone | |
| SEQ ID NOS: 60 | MGC: 5612, mRNA, complete cds. | |
| (DNA) and 207 | /FEA = mRNA /PROD = ras homolog gene | |
| (amino acid) | family, member /DB_XREF = gi: 12654980 | |
| | /UG = Hs.15114 ras homolog gene family, | |
| | member /FL = gb: BC001338.1 gb: NM_014578.1 | |
| PSPHL: | gb: NM_003832.1 /DEF = Homo sapiens | 205048_s_at |
| phosphoserine | phosphoserine phosphatase-like (PSPHL), | |
| phosphatase-like | mRNA. /FEA = mRNA /GEN = PSPHL | |
| (LOC8781) | /PROD = L-3-phosphoserine phosphatase | |
| SEQ ID NOS: 61 | homolog /DB_XREF = gi: 4502934 | |
| (DNA) and 208 | /UG = Hs.76845 phosphoserine phosphatase-like | |
| (amino acid) | /FL = gb: NM_003832.1 | |
| RAB25: RAB25 | gb: NM_020387.1 /DEF = Homo sapiens CATX- | 218186_at |
| (LOC57111) | 8 protein (CATX-8), mRNA. /FEA = mRNA | |
| SEQ ID NOS: 62 | /GEN = CATX-8 /PROD = CATX-8 protein | |
| (DNA) and 209 | /DB_XREF = gi: 9966860 /UG = Hs.150826 | |
| (amino acid) | CATX-8 protein /FL = gb: AF083124.1 | |
| | gb: NM_020387.1 | |
| SPINT1: hepatocyte | gb: NM_003710.1 /DEF = Homo sapiens serine | 202826_at |
| growth factor | protease inhibitor, Kunitz type 1 (SPINT1), | |
| activator inhibitor 1 | mRNA. /FEA = mRNA /GEN = SPINT1 | |
| isoform 2 precursor | /PROD = hepatocyte growth factor activator | |
| (LOC6692) | inhibitorprecursor /DB_XREF = gi: 4504328 | |
| SEQ ID NOS: 63 | /UG = Hs.233950 serine protease inhibitor, | |
| (DNA) and 210 | Kunitz type 1 /FL: = gb: BC004140.1 | |
| (amino acid) | gb: AB000095.1 gb: NM_003710.1 | |
| SPINT2: serine | gb: AF027205.1 /DEF = Homo sapiens Kunitz- | 210715_s_at |
| protease inhibitor, | type protease inhibitor (kop) mRNA, complete | |
| Kunitz type, 2 | cds. /FEA = mRNA /GEN = kop /PROD = Kunitz- | |
| (LOC10653) | type protease inhibitor /DB_XREF = gi: 2598967 | |
| SEQ ID NOS: 64 | /UG = Hs.31439 serine protease inhibitor, Kunitz | |
| (DNA) and 211 | type, 2 /FL = gb: AF027205.1 | |
| (amino acid) | | |
| EMP3: epithelial | gb: NM_001425.1 /DEF = Homo sapiens | 203729_at |
| membrane protein 3 | epithelial membrane protein 3 (EMP3), mRNA. | |
| (LOC2014) | /FEA = mRNA /GEN = EMP3 /PROD = epithelial | |
| SEQ ID NOS: 65 | membrane protein 3 /DB_XREF = gi: 4503562 | |
| (DNA) and 212 | /UG = Hs.9999 epithelial membrane protein 3 | |
| (amino acid) | /FL = gb: U52101.1 gb: U87947.1 | |
| | gb: NM_001425.1 | |
| TENS1: tensin-like | gb: NM_022748.1 /DEF = Homo sapiens | 217853_at |
| SH2 domain- | hypothetical protein FLJ13732 similar to tensin | |
| containing 1 | (FLJ13732), mRNA. /FEA = mRNA | |
| (LOC64759) | /GEN = FLJ13732 /PROD = hypothetical protein | |
| SEQ ID NOS: 66 | FLJ13732 similar to tensin | |
| (DNA) and 213 | /DB_XREF = gi: 12232408 /UG = Hs.12210 | |
| (amino acid) | hypothetical protein FLJ13732 similar to tensin | |
| | /FL = gb: NM_022748.1 | |
| HIF1A: hypoxia- | gb: NM_001530.1 /DEF = Homo sapiens | 200989_at |
| inducible factor 1, | hypoxia-inducible factor 1, alpha subunit (basic | |
| alpha subunit isoform | helix-loop-helix transcription factor) (HIF1A), | |
| 1 (LOC3091) | mRNA. /FEA = mRNA /GEN = HIF1A | |
| SEQ ID NOS: 67 | /PROD = hypoxia-inducible factor 1, alpha | |
| (DNA) and 214 | subunit (basichelix-loop-helix transcription | |
| (amino acid) | factor) /DB_XREF = gi: 4504384 | |
| | /UG = Hs.197540 hypoxia-inducible factor 1, | |
| | alpha subunit (basic helix-loop-helix | |
| | transcription factor) /FL = gb: U29165.1 | |
| | gb: AF304431.1 gb: NM_001530.1 | |
| | gb: AF207601.1 gb: AF207602.1 gb: U22431.1 | |
| ST14: matriptase | gb: NM_021978.1 /DEF = Homo sapiens | 202005_at |
| (LOC6768) | suppression of tumorigenicity 14 (colon | |
| SEQ ID NOS: 68 | carcinoma, matriptase, epithin) (ST14), mRNA. | |
| (DNA) and 215 | /FEA = mRNA /GEN = ST14 | |
| (amino acid) | /PROD = suppression of tumorigenicity 14 | |
| | (coloncarcinoma, matriptase, epithin) | |
| | /DB_XREF = gi: 11415039 /UG = Hs.56937 | |
| | suppression of tumorigenicity 14 (colon | |
| | carcinoma, matriptase, epithin) | |
| | /FL = gb: AF057145.1 gb: NM_021978.1 | |
| | gb: AB030036.1 gb: AF133086.1 | |
| | gb: AF118224.2 | |
| STK17A: | Consensus includes gb: AW194730 /FEA = EST | 202693_s_at |
| serine/threonine | /DB_XREF = gi: 6473630 | |
| kinase 17a | /DB_XREF = est: xn43d11.x1 | |
| (apoptosis-inducing) | /CLONE = IMAGE: 2696469 /UG = Hs.9075 | |
| (LOC9263) | serinethreonine kinase 17a (apoptosis-inducing) | |
| SEQ ID NOS: 69 | /FL = gb: AB011420.1 gb: NM_004760.1 | |
| (DNA) and 216 | | |
| (amino acid) | | |
| SH3YL1: | gb: NM_015677.1 /DEF = Homo sapiens | 204019_s_at |
| hypothetical protein | hypothetical protein (DKFZP586F1318), | |
| DKFZP586F1318 | mRNA. /FEA = mRNA | |
| (LOC26751) | /GEN = DKFZP586F1318 /PROD = hypothetical | |
| SEQ ID NOS: 70 | protein /DB_XREF = gi: 7661669 /UG = Hs.25213 | |
| (DNA) and 217 | hypothetical protein /FL = gb: NM_015677.1 | |
| (amino acid) | | |
| EXT1: exostoses | gb: NM_000127.1 /DEF = Homo sapiens | 201995_at |
| (multiple) 1 | exostoses (multiple) 1 (EXT1), mRNA. | |
| (LOC2131) | /FEA = mRNA /GEN = EXT1 /PROD = exostoses | |
| SEQ ID NOS: 71 | (multiple) 1 /DB_XREF = gi: 4557570 | |
| (DNA) and 218 | /UG = Hs.184161 exostoses (multiple) 1 | |
| (amino acid) | /FL = gb: BC001174.1 gb: NM_000127.1 | |
| GALNT7: | gb: NM_017423.1 /DEF = Homo sapiens UDP- | 218313_s_at |
| polypeptide N- | N-acetyl-alpha-D-galactosamine: polypeptide | |
| acetylgalactosaminyltransferase 7 | N-acetylgalactosaminyltransferase 7 (GalNAc- | |
| (LOC51809) | T7) (GALNT7), mRNA. /FEA = mRNA | |
| SEQ ID NOS: 72 | /GEN = GALNT7 /PROD = polypeptide N- | |
| (DNA) and 219 | acetylgalactosaminyltransferase 7 | |
| (amino acid) | /DB_XREF = gi: 8393408 /UG = Hs.246315 UDP- | |
| | N-acetyl-alpha-D-galactosamine: polypeptide | |
| | N-acetylgalactosaminyltransferase 7 (GalNAc- | |
| | T7) /FL = gb: NM_017423.1 | |
| SDC1: syndecan 1 | gb: NM_002997.1 /DEF = Homo sapiens | 201287_s_at |
| (LOC6382) | syndecan 1 (SDC1), mRNA. /FEA = mRNA | |
| SEQ ID NOS: 73 | /GEN = SDC1 /PROD = syndecan 1 | |
| (DNA) and 220 | /DB_XREF = gi: 4506858 /UG = Hs.82109 | |
| (amino acid) | syndecan 1 /FL = gb: J05392.1 gb: NM_002997.1 | |
| ITGAV: integrin, | Consensus includes gb: AI093579 /FEA = EST | 202351_at |
| alpha V (vitronectin | /DB_XREF = gi: 3432555 | |
| receptor, alpha | /DB_XREF = est: qb15g06.x1 | |
| polypeptide, antigen | /CLONE = IMAGE: 1696378 /UG = Hs.295726 | |
| CD51) (LOC3685) | integrin, alpha V (vitronectin receptor, alpha | |
| SEQ ID NOS: 74 | polypeptide, antigen CD51) /FL = gb: M14648.1 | |
| (DNA) and 221 | gb: NM_002210.1 | |
| (amino acid) | | |
| ANXA6: annexin VI | gb: NM_001155.2 /DEF = Homo sapiens annexin | 200982_s_at |
| isoform 1 (LOC309) | A6 (ANXA6), transcript variant 1, mRNA. | |
| SEQ ID NOS: 75 | /FEA = mRNA /GEN = ANXA6 /PROD = annexin | |
| (DNA) and 222 | VI isoform 1 /DB_XREF = gi: 4809274 | |
| (amino acid) | /UG = Hs.118796 annexin A6 /FL = gb: J03578.1 | |
| | gb: D00510.1 gb: NM_001155.2 | |
| PDGFC: platelet- | gb: NM_016205.1 /DEF = Homo sapiens platelet | 218718_at |
| derived growth factor | derived growth factor C (PDGFC), mRNA. | |
| C precursor | /FEA = mRNA /GEN = PDGFC | |
| (LOC56034) | /PROD = secretory growth factor-like protein | |
| SEQ ID NOS: 76 | fallotein /DB_XREF = gi: 9994186 | |
| (DNA) and 223 | /UG = Hs.43080 platelet derived growth factor C | |
| (amino acid) | /FL = gb: AF091434.1 gb: AF244813.1 | |
| | gb: AB033831.1 gb: NM_016205.1 | |
| FLNA: filamin 1 | Consensus includes gb: AI625550 /FEA = EST | 214752_x_at |
| (actin-binding | /DB_XREF = gi: 4650481 | |
| protein-280) | /DB_XREF = est: ty57d06.x1 | |
| (LOC2316) | /CLONE = IMAGE: 2283179 /UG = Hs.195464 | |
| SEQ ID NOS: 77 | filamin A, alpha (actin-binding protein-280) | |
| (DNA) and 224 | | |
| (amino acid) | | |
| FLNA: filamin 1 | Consensus includes gb: AW051856 /FEA = EST | 213746_s_at |
| (actin-binding | /DB_XREF = gi: 5914215 | |
| protein-280) | /DB_XREF = est: wz04a05.x1 | |
| (LOC2316) | /CLONE = IMAGE: 2557040 /UG = Hs.195464 | |
| SEQ ID NOS: 78 | filamin A, alpha (actin-binding protein-280) | |
| (DNA) and 225 | | |
| (amino acid) | | |
| TUBA3: tubulin, | gb: AF141347.1 /DEF = Homo sapiens hum-a- | 209118_s_at |
| alpha 3 (LOC7846) | tub2 alpha-tubulin mRNA, complete cds. | |
| SEQ ID NOS: 79 | /FEA = mRNA /PROD = alpha-tubulin | |
| (DNA) and 226 | /DB_XREF = gi: 4929133 /UG = Hs.272897 | |
| (amino acid) | Tubulin, alpha, brain-specific | |
| | /FL = gb: AF141347.1 gb: NM_006009.1 | |
| LOXL2: lysyl | gb: NM_002318.1 /DEF = Homo sapiens lysyl | 202998_s_at |
| oxidase-like 2 | oxidase-like 2 (LOXL2), mRNA. /FEA = mRNA | |
| (LOC4017) | /GEN = LOXL2 /PROD = lysyl oxidase-like 2 | |
| SEQ ID NOS: 80 | /DB_XREF = gi: 4505010 /UG = Hs.83354 lysyl | |
| (DNA) and 227 | oxidase-like 2 /FL = gb: BC000594.1 | |
| (amino acid) | gb: U89942.1 gb: NM_002318.1 gb: AF117949.1 | |
| CYR61: cysteine- | gb: AF003114.1 /DEF = Homo sapiens CYR61 | 210764_s_at |
| rich, angiogenic | mRNA, complete cds. /FEA = mRNA | |
| inducer, 61 | /GEN = CYR61 /DB_XREF = gi: 6649848 | |
| (LOC3491) | /UG = Hs.8867 cysteine-rich, angiogenic | |
| SEQ ID NOS: 81 | inducer, 61 /FL = gb: AF003114.1 | |
| (DNA) and 228 | | |
| (amino acid) | | |
| GALNT3: | Consensus includes gb: BF063271 /FEA = EST | 203397_s_at |
| polypeptide N- | /DB_XREF = gi: 10822181 | |
| acetylgalactosaminyltransferase 3 | /DB_XREF = est: 7h87d05.x1 | |
| (LOC2591) | /CLONE = IMAGE: 3322953 /UG = Hs.278611 | |
| SEQ ID NOS: 82 | UDP-N-acetyl-alpha-D- | |
| (DNA) and 229 | galactosamine: polypeptide N- | |
| (amino acid) | acetylgalactosaminyltransferase 3 (GalNAc-T3) | |
| | /FL = gb: NM_004482.2 | |
| MAP1B: | Consensus includes gb: AL523076 /FEA = EST | 212233_at |
| microtubule- | /DB_XREF = gi: 12786569 | |
| associated protein 1B | /DB_XREF = est: AL523076 | |
| isoform 1 (LOC4131) | /CLONE = CS0DC001YI12 (3 prime) | |
| SEQ ID NOS: 83 | /UG = Hs.82503 H. sapiens mRNA for 3UTR of | |
| (DNA) and 230 | unknown protein | |
| (amino acid) | | |
| TUBB-5: tubulin | gb: BC002654.1 /DEF = Homo sapiens , Similar | 209191_at |
| beta-5 (LOC84617) | to tubulin, beta, 4, clone MGC: 4083, mRNA, | |
| SEQ ID NOS: 84 | complete cds. /FEA = mRNA /PROD = Similar to | |
| (DNA) and 231 | tubulin, beta, 4 /DB_XREF = gi: 12803638 | |
| (amino acid) | /UG = Hs.274398 Homo sapiens , Similar to | |
| | tubulin, beta, 4, clone MGC: 4083, mRNA, | |
| | complete cds /FL = gb: BC002654.1 | |
| TYMS: thymidylate | gb: NM_001071.1 /DEF = Homo sapiens | 202589_at |
| synthetase | thymidylate synthetase (TYMS), mRNA. | |
| (LOC7298) | /FEA = mRNA /GEN = TYMS | |
| SEQ ID NOS: 85 | /PROD = thymidylate synthetase | |
| (DNA) and 232 | /DB_XREF = gi: 4507750 /UG = Hs.82962 | |
| (amino acid) | thymidylate synthetase /FL = gb: BC002567.1 | |
| | gb: NM_001071.1 | |
| IFI16: interferon, | gb: NM_005531.1 /DEF = Homo sapiens | 206332_s_at |
| gamma-inducible | interferon, gamma-inducible protein 16 (IFI16), | |
| protein 16 | mRNA. /FEA = mRNA /GEN = IFI16 | |
| (LOC3428) | /PROD = interferon, gamma-inducible protein 16 | |
| SEQ ID NOS: 86 | /DB_XREF = gi: 5031778 /UG = Hs.155530 | |
| (DNA) and 233 | interferon, gamma-inducible protein 16 | |
| (amino acid) | /FL = gb: M63838.1 gb: NM_005531.1 | |
| GRB10: growth | gb: D86962.1 /DEF = Human mRNA for | 209409_at |
| factor receptor-bound | KIAA0207 gene, complete cds. /FEA = mRNA | |
| protein 10 | /GEN = KIAA0207 /DB_XREF = gi: 1503997 | |
| (LOC2887) | /UG = Hs.81875 growth factor receptor-bound | |
| SEQ ID NOS: 87 | protein 10 /FL = gb: D86962.1 gb: AF000017.1 | |
| (DNA) and 234 | | |
| (amino acid) | | |
| FLNA: filamin 1 | gb: NM_001456.1 /DEF = Homo sapiens filamin | 200859_x_at |
| (actin-binding | A, alpha (actin-binding protein-280) (FLNA), | |
| protein-280) | mRNA. /FEA = mRNA /GEN = FLNA | |
| (LOC2316) | /PROD = filamin 1 (actin-binding protein-280) | |
| SEQ ID NOS: 88 | /DB_XREF = gi: 4503744 /UG = Hs.195464 | |
| (DNA) and 235 | filamin A, alpha (actin-binding protein-280) | |
| (amino acid) | /FL = gb: NM_001456.1 | |
| TNC: tenascin C | gb: NM_002160.1 /DEF = Homo sapiens | 201645_at |
| (hexabrachion) | hexabrachion (tenascin C, cytotactin) (HXB), | |
| (LOC3371) | mRNA. /FEA = mRNA /GEN = HXB | |
| SEQ ID NOS: 89 | /PROD = hexabrachion (tenascin C, cytotactin) | |
| (DNA) and 236 | /DB_XREF = gi: 4504548 /UG = Hs.289114 | |
| (amino acid) | hexabrachion (tenascin C, cytotactin) | |
| | /FL = gb: M55618.1 gb: NM_002160.1 | |
| SLC26A2: sulfate | Consensus includes gb: AI025519 /FEA = EST | 205097_at |
| anion transporter 1 | /DB_XREF = gi: 3241132 | |
| (LOC1836) | /DB_XREF = est: ov75c04.x1 | |
| SEQ ID NOS: 90 | /CLONE = IMAGE: 1643142 /UG = Hs.29981 | |
| (DNA) and 237 | solute carrier family 26 (sulfate transporter), | |
| (amino acid) | member 2 /FL = gb: NM_000112.1 gb: U14528.1 | |
| KIAA0746: | Consensus includes gb: AB018289.1 | 212314_at |
| KIAA0746 protein | /DEF = Homo sapiens mRNA for KIAA0746 | |
| (LOC23231) | protein, partial cds. /FEA = mRNA | |
| SEQ ID NOS: 91 | /GEN = KIAA0746 /PROD = KIAA0746 protein | |
| (DNA) and 238 | /DB_XREF = gi: 3882212 /UG = Hs.49500 | |
| (amino acid) | KIAA0746 protein | |
| LAMP1: lysosomal- | gb: NM_005561.2 /DEF = Homo sapiens | 201553_s_at |
| associated membrane | lysosomal-associated membrane protein 1 | |
| protein 1 (LOC3916) | (LAMP1), mRNA. /FEA = mRNA | |
| SEQ ID NOS: 92 | /GEN = LAMP1 /PROD = lysosomal-associated | |
| (DNA) and 239 | membrane protein 1 /DB_XREF = gi: 7669500 | |
| (amino acid) | /UG = Hs.150101 lysosomal-associated | |
| | membrane protein 1 /FL = gb: J04182.1 | |
| | gb: J03263.1 gb: NM_005561.2 | |
| DPYSL2: | gb: NM_001386.1 /DEF = Homo sapiens | 200762_at |
| dihydropyrimidinase- | dihydropyrimidinase-like 2 (DPYSL2), mRNA. | |
| like 2 (LOC1808) | /FEA = mRNA /GEN = DPYSL2 | |
| SEQ ID NOS: 93 | /PROD = dihydropyrimidinase-like 2 | |
| (DNA) and 240 | /DB_XREF = gi: 4503376 /UG = Hs.173381 | |
| (amino acid) | dihydropyrimidinase-like 2 /FL = gb: U17279.1 | |
| | gb: D78013.1 gb: U97105.1 gb: NM_001386.1 | |
| IFI16: interferon, | gb: AF208043.1 /DEF = Homo sapiens IFI16b | 208966_x_at |
| gamma-inducible | (IFI16b) mRNA, complete cds. /FEA = mRNA | |
| protein 16 | /GEN = IFI16b /PROD = IFI16b | |
| (LOC3428) | /DB_XREF = gi: 6644296 /UG = Hs.155530 | |
| SEQ ID NOS: 94 | interferon, gamma-inducible protein 16 | |
| (DNA) and 241 | /FL = gb: AF208043.1 | |
| (amino acid) | | |
| KPNB2: karyopherin | Consensus includes gb: AI307759 /FEA = EST | 221829_s_at |
| beta 2 (LOC3842) | /DB_XREF = gi: 4002363 | |
| SEQ ID NOS: 95 | /DB_XREF = est: tb24g08.x1 | |
| (DNA) and 242 | /CLONE = IMAGE: 2055326 /UG = Hs.168075 | |
| (amino acid) | karyopherin (importin) beta 2 | |
| PRNP: prion protein | gb: NM_000311.1 /DEF = Homo sapiens prion | 201300_s_at |
| preproprotein | protein (p27-30) (Creutzfeld-Jakob disease, | |
| (LOC5621) | Gerstmann-Strausler-Scheinker syndrome, fatal | |
| SEQ ID NOS: 96 | familial insomnia) (PRNP), mRNA. | |
| (DNA) and 243 | /FEA = mRNA /GEN = PRNP /PROD = prion | |
| (amino acid) | protein /DB_XREF = gi: 4506112 /UG = Hs.74621 | |
| | prion protein (p27-30) (Creutzfeld-Jakob | |
| | disease, Gerstmann-Strausler-Scheinker | |
| | syndrome, fatal familial insomnia) | |
| | /FL = gb: AY008282.1 gb: M13899.1 | |
| | gb: NM_000311.1 | |
| RAI14: retinoic acid | gb: NM_015577.1 /DEF = Homo sapiens novel | 202052_s_at |
| induced 14 | retinal pigment epithelial gene (NORPEG), | |
| (LOC26064) | mRNA. /FEA = mRNA /GEN = NORPEG | |
| SEQ ID NOS: 97 | /PROD = DKFZP564G013 protein | |
| (DNA) and 244 | /DB_XREF = gi: 13470085 /UG = Hs.15165 novel | |
| (amino acid) | retinal pigment epithelial gene | |
| | /FL = gb: NM_015577.1 gb: AF155135.1 | |
| JAG1: jagged 1 | gb: U61276.1 /DEF = Human transmembrane | 209098_s_at |
| precursor (LOC182) | protein Jagged 1 (HJ1) mRNA, complete cds. | |
| SEQ ID NOS: 98 | /FEA = mRNA /GEN = HJ1 | |
| (DNA) and 245 | /PROD = transmembrane protein Jagged 1 | |
| (amino acid) | /DB_XREF = gi: 1438936 /UG = Hs.91143 jagged | |
| | 1 (Alagille syndrome) /FL = gb: U61276.1 | |
| | gb: U73936.1 gb: AF003837.1 gb: AF028593.1 | |
| | gb: NM_000214.1 | |
| CLIC4: chloride | gb: NM_013943.1 /DEF = Homo sapiens chloride | 201560_at |
| intracellular channel | intracellular channel 4 (CLIC4), mRNA. | |
| 4 (LOC25932) | /FEA = mRNA /GEN = CLIC4 /PROD = chloride | |
| SEQ ID NOS: 99 | intracellular channel 4 /DB_XREF = gi: 7330334 | |
| (DNA) and 246 | /UG = Hs.25035 chloride intracellular channel 4 | |
| (amino acid) | /FL = gb: AF109196.1 gb: AF097330.1 | |
| | gb: AL117424.1 gb: NM_013943.1 | |
| TP53I3: tumor | gb: BC000474.1 /DEF = Homo sapiens , quinone | 210609_s_at |
| protein p53 inducible | oxidoreductase homolog, clone MGC: 8642, | |
| protein 3 (LOC9540) | mRNA, complete cds. /FEA = mRNA | |
| SEQ ID NOS: 100 | /PROD = quinone oxidoreductase homolog | |
| (DNA) and 247 | /DB_XREF = gi: 12653408 /UG = Hs.50649 | |
| (amino acid) | quinone oxidoreductase homolog | |
| | /FL = gb: BC000474.1 | |
| EFA6R: ADP- | Consensus includes gb: AW117368 /FEA = EST | 203354_s_at |
| ribosylation factor | /DB_XREF = gi: 6085952 | |
| guanine nucleotide | /DB_XREF = est: xd88h01.x1 | |
| factor 6 (LOC23362) | /CLONE = IMAGE: 2604721 /UG = Hs.6763 | |
| SEQ ID NOS: 101 | KIAA0942 protein /FL = gb: AF243495.2 | |
| (DNA) and 248 | gb: NM_015310.1 | |
| (amino acid) | | |
| JUP: junction | gb: NM_021991.1 /DEF = Homo sapiens junction | 201015_s_at |
| plakoglobin | plakoglobin (JUP), transcript variant 2, mRNA. | |
| (LOC3728) | /FEA = mRNA /GEN = JUP /PROD = junction | |
| SEQ ID NOS: 102 | plakoglobin, isoform 1 | |
| (DNA) and 249 | /DB_XREF = gi: 12056467 /UG = Hs.2340 | |
| (amino acid) | junction plakoglobin /FL = gb: NM_021991.1 | |
| | gb: BC000441.1 | |
| PAPSS2: 3′- | gb: NM_004670.1 /DEF = Homo sapiens 3- | 203059_s_at |
| phosphoadenosine 5′- | phosphoadenosine 5-phosphosulfate synthase 2 | |
| phosphosulfate | (PAPSS2), mRNA. /FEA = mRNA | |
| synthase 2 | /GEN = PAPSS2 /PROD = 3-prime- | |
| (LOC9060) | phosphoadenosine 5-prime- | |
| SEQ ID NOS: 103 | phosphosulfatesynthase 2 | |
| (DNA) and 250 | /DB_XREF = gi: 4758879 /UG = Hs.274230 3- | |
| (amino acid) | phosphoadenosine 5-phosphosulfate synthase 2 | |
| | /FL = gb: AF150754.2 gb: AF313907.1 | |
| | gb: AF091242.1 gb: NM_004670.1 | |
| | gb: AF074331.1 gb: AF173365.1 | |
| DKK3: dickkopf | Consensus includes gb: AU148057 /FEA = EST | 214247_s_at |
| homolog 3 | /DB_XREF = gi: 11009578 | |
| (LOC27122) | /DB_XREF = est: AU148057 | |
| SEQ ID NOS: 104 | /CLONE = MAMMA1002489 /UG = Hs.278503 | |
| (DNA) and 251 | regulated in glioma | |
| (amino acid) | | |
| JAG1: jagged 1 | Consensus includes gb: U77914.1 /DEF = Human | 216268_s_at |
| precursor (LOC182) | soluble protein Jagged mRNA, partial cds. | |
| SEQ ID NOS: 105 | /FEA = mRNA /PROD = soluble protein Jagged | |
| (DNA) and 252 | /DB_XREF = gi: 1684889 /UG = Hs.91143 jagged | |
| (amino acid) | 1 (Alagille syndrome) | |
| CALD1: caldesmon 1 | Consensus includes gb: AL583520 /FEA = EST | 212077_at |
| isoform 3 (LOC800) | /DB_XREF = gi: 12952562 | |
| SEQ ID NOS: 106 | /DB_XREF = est: AL583520 | |
| (DNA) and 253 | /CLONE = CS0DC024YE13 (5 prime) | |
| (amino acid) | /UG = Hs.182183 Homo sapiens mRNA for | |
| | caldesmon, 3 UTR | |
| DPYSL3: | Consensus includes gb: W72516 /FEA = EST | 201430_s_at |
| dihydropyrimidinase- | /DB_XREF = gi: 1382173 | |
| like 3 (LOC1809) | /DB_XREF = est: zd64g05.s1 | |
| SEQ ID NOS: 107 | /CLONE = IMAGE: 345464 /UG = Hs.74566 | |
| (DNA) and 254 | dihydropyrimidinase-like 3 /FL = gb: D78014.1 | |
| (amino acid) | gb: NM_001387.1 | |
| PMP22: peripheral | gb: L03203.1 /DEF = Human peripheral myelin | 210139_s_at |
| myelin protein 22 | protein 22 (GAS3) mRNA, complete cds. | |
| (LOC5376) | /FEA = mRNA /GEN = GAS3 /PROD = peripheral | |
| SEQ ID NOS: 108 | myelin protein 22 /DB_XREF = gi: 182984 | |
| (DNA) and 255 | /UG = Hs.103724 peripheral myelin protein 22 | |
| (amino acid) | /FL = gb: L03203.1 | |
| ALCAM: activated | Consensus includes gb: BF242905 /FEA = EST | 201951_at |
| leukocyte cell | /DB_XREF = gi: 11156833 | |
| adhesion molecule | /DB_XREF = est: 601877949F1 | |
| (LOC214) | /CLONE = IMAGE: 4106028 /UG = Hs.10247 | |
| SEQ ID NOS: 109 | activated leucocyte cell adhesion molecule | |
| (DNA) and 256 | /FL = gb: NM_001627.1 gb: L38608.1 | |
| (amino acid) | | |
| PAPSS2: 3′- | Consensus includes gb: AW299958 /FEA = EST | 203058_s_at |
| phosphoadenosine 5′- | /DB_XREF = gi: 6709635 | |
| phosphosulfate | /DB_XREF = est: xs44g05.x1 | |
| synthase 2 | /CLONE = IMAGE: 2772536 /UG = Hs.274230 3- | |
| (LOC9060) | phosphoadenosine 5-phosphosulfate synthase 2 | |
| SEQ ID NOS: 110 | /FL = gb: AF150754.2 gb: AF313907.1 | |
| (DNA) and 257 | gb: AF091242.1 gb: NM_004670.1 | |
| (amino acid) | gb: AF074331.1 gb: AF173365.1 | |
| KPNB2: karyopherin | gb: NM_002270.1 /DEF = Homo sapiens | 207657_x_at |
| beta 2 (LOC3842) | karyopherin (importin) beta 2 (KPNB2), | |
| SEQ ID NOS: 111 | mRNA. /FEA = mRNA /GEN = KPNB2 | |
| (DNA) and 258 | /PROD = karyopherin (importin) beta 2 | |
| (amino acid) | /DB_XREF = gi: 4504906 /UG = Hs.168075 | |
| | karyopherin (importin) beta 2 | |
| | /FL = gb: U70322.1 gb: NM_002270.1 | |
| PTPRE: protein | Consensus includes gb: AA775177 /FEA = EST | 221840_at |
| tyrosine phosphatase, | /DB_XREF = gi: 2834511 | |
| receptor type, E | /DB_XREF = est: ac79a06.s1 | |
| isoform 1 precursor | /CLONE = IMAGE: 868786 /UG = Hs.31137 | |
| (LOC5791) | protein tyrosine phosphatase, receptor type, E | |
| SEQ ID NOS: 112 | /FL = gb: NM_006504.1 | |
| (DNA) and 259 | | |
| (amino acid) | | |
| TRB2: tribbles | gb: NM_021643.1 /DEF = Homo sapiens GS3955 | 202478_at |
| homolog 2 | protein (GS3955), mRNA. /FEA = mRNA | |
| (LOC28951) | /GEN = GS3955 /PROD = GS3955 protein | |
| SEQ ID NOS: 113 | /DB_XREF = gi: 11056053 /UG = Hs.155418 | |
| (DNA) and 260 | GS3955 protein /FL = gb: NM_021643.1 | |
| (amino acid) | gb: BC002637.1 gb: D87119.1 | |
| COL13A1: alpha 1 | gb: M33653.1 /DEF = Human (clones HT- | 211343_s_at |
| type XIII collagen | 125,133) alpha-2 type IV collagen (COL4A2) | |
| isoform 1 (LOC130) | mRNA, complete cds. /FEA = mRNA | |
| SEQ ID NOS: 114 | /GEN = COL4A2 /PROD = alpha-2 type IV | |
| (DNA) and 261 | collagen /DB_XREF = gi: 180828 | |
| (amino acid) | /UG = Hs.211933 collagen, type XIII, alpha 1 | |
| | /FL = gb: M33653.1 | |
| PALM2: paralemmin | gb: NM_007203.1 /DEF = Homo sapiens A | 202760_s_at |
| 2 (LOC114299) | kinase (PRKA) anchor protein 2 (AKAP2), | |
| SEQ ID NOS: 115 | mRNA. /FEA = mRNA /GEN = AKAP2 | |
| (DNA) and 262 | /PROD = A kinase (PRKA) anchor protein 2 | |
| (amino acid) | /DB_XREF = gi: 6005708 /UG = Hs.42322 A | |
| | kinase (PRKA) anchor protein 2 | |
| | /FL = gb: AB023137.1 gb: NM_007203.1 | |
| GJA1: connexin 43 | gb: NM_000165.2 /DEF = Homo sapiens gap | 201667_at |
| (LOC2697) | junction protein, alpha 1, 43 kD (connexin 43) | |
| SEQ ID NOS: 116 | (GJA1), mRNA. /FEA = mRNA /GEN = GJA1 | |
| (DNA) and 263 | /PROD = connexin 43 /DB_XREF = gi: 4755136 | |
| (amino acid) | /UG = Hs.74471 gap junction protein, alpha 1, | |
| | 43 kD (connexin 43) /FL = gb: M65188.1 | |
| | gb: NM_000165.2 | |
| FLJ10901: | gb: NM_018265.1 /DEF = Homo sapiens | 219010_at |
| hypothetical protein | hypothetical protein FLJ10901 (FLJ10901), | |
| FLJ10901 | mRNA. /FEA = mRNA /GEN = FLJ10901 | |
| (LOC55765) | /PROD = hypothetical protein FLJ10901 | |
| SEQ ID NOS: 117 | /DB_XREF = gi: 8922753 /UG = Hs.73239 | |
| (DNA) and 264 | hypothetical protein FLJ10901 | |
| (amino acid) | /FL = gb: NM_018265.1 | |
| EFEMP1: EGF- | Consensus includes gb: AI826799 /FEA = EST | 201842_s_at |
| containing fibulin- | /DB_XREF = gi: 5447470 | |
| like extracellular | /DB_XREF = est: wk56d07.x1 | |
| matrix protein 1 | /CLONE = IMAGE: 2419405 /UG = Hs.76224 | |
| isoform a precursor | EGF-containing fibulin-like extracellular matrix | |
| (LOC2202) | protein 1 /FL = gb: U03877.1 gb: NM_004105.2 | |
| SEQ ID NOS: 118 | | |
| (DNA) and 265 | | |
| (amino acid) | | |
| NRP1: neuropilin 1 | Consensus includes gb: BE620457 /FEA = EST | 212298_at |
| (LOC8829) | /DB_XREF = gi: 9891395 | |
| SEQ ID NOS: 119 | /DB_XREF = est: 601483690F1 | |
| (DNA) and 266 | /CLONE = IMAGE: 3886055 /UG = Hs.69285 | |
| (amino acid) | neuropilin 1 /FL = gb: AF018956.1 | |
| | gb: AF016050.1 gb: NM_003873.1 | |
| CLDN7: claudin 7 | gb: NM_001307.1 /DEF = Homo sapiens claudin | 202790_at |
| (LOC1366) | 7 (CLDN7), mRNA. /FEA = mRNA | |
| SEQ ID NOS: 120 | /GEN = CLDN7 /PROD = claudin 7 | |
| (DNA) and 267 | /DB_XREF = gi: 10835007 /UG = Hs.278562 | |
| (amino acid) | claudin 7 /FL = gb: NM_001307.1 | |
| | gb: BC001055.1 | |
| CED-6: PTB domain | gb: NM_016315.1 /DEF = Homo sapiens CED-6 | 204237_at |
| adaptor protein CED- | protein (CED-6), mRNA. /FEA = mRNA | |
| 6 (LOC51454) | /GEN = CED-6 /PROD = CED-6 protein | |
| SEQ ID NOS: 121 | /DB_XREF = gi: 7705317 /UG = Hs.107056 CED- | |
| (DNA) and 268 | 6 protein /FL = gb: AF200715.1 gb: AF191771.1 | |
| (amino acid) | gb: NM_016315.1 | |
| CSPG2: chondroitin | Consensus includes gb: BF590263 /FEA = EST | 204619_s_at |
| sulfate proteoglycan 2 | /DB_XREF = gi: 11682587 | |
| (versican) (LOC1462) | /DB_XREF = est: nab22b12.x1 | |
| SEQ ID NOS: 122 | /CLONE = IMAGE: 3266638 /UG = Hs.81800 | |
| (DNA) and 269 | chondroitin sulfate proteoglycan 2 (versican) | |
| (amino acid) | /FL = gb: NM_004385.1 | |
| KPNB2: karyopherin | gb: U72069.1 /DEF = Human karyopherin beta2 | 209226_s_at |
| beta 2 (LOC3842) | mRNA, complete cds. /FEA = mRNA | |
| SEQ ID NOS: 123 | /PROD = karyopherin beta2 | |
| (DNA) and 270 | /DB_XREF = gi: 1657775 /UG = Hs.168075 | |
| (amino acid) | karyopherin (importin) beta 2 | |
| | /FL = gb: U72069.1 gb: U72395.1 | |
| MLAT4: myxoid | gb: NM_018192.1 /DEF = Homo sapiens | 218717_s_at |
| liposarcoma | hypothetical protein FLJ10718 (FLJ10718), | |
| associated protein 4 | mRNA. /FEA = mRNA /GEN = FLJ10718 | |
| (LOC55214) | /PROD = hypothetical protein FLJ10718 | |
| SEQ ID NOS: 124 | /DB_XREF = gi: 8922618 /UG = Hs.42824 | |
| (DNA) and 271 | hypothetical protein FLJ10718 | |
| (amino acid) | /FL = gb: NM_018192.1 | |
| TPM1: tropomyosin 1 | gb: Z24727.1 /DEF = H. sapiens tropomyosin | 210986_s_at |
| (alpha) (LOC7168) | isoform mRNA, complete CDS. /FEA = mRNA | |
| SEQ ID NOS: 125 | /PROD = tropomyosin isoform | |
| (DNA) and 272 | /DB_XREF = gi: 854188 /UG = Hs.77899 | |
| (amino acid) | tropomyosin 1 (alpha) /FL = gb: Z24727.1 | |
| LY96: MD-2 protein | gb: NM_015364.1 /DEF = Homo sapiens MD-2 | 206584_at |
| (LOC23643) | protein (MD-2), mRNA. /FEA = mRNA | |
| SEQ ID NOS: 126 | /GEN = MD-2 /PROD = MD-2 protein | |
| (DNA) and 273 | /DB_XREF = gi: 7662503 /UG = Hs.69328 MD-2 | |
| (amino acid) | protein /FL = gb: AB018549.1 gb: NM_015364.1 | |
| | gb: AF168121.1 | |
| COL6A1: collagen, | Consensus includes gb: AI141603 /FEA = EST | 212091_s_at |
| type VI, alpha 1 | /DB_XREF = gi: 3649060 | |
| precursor (LOC1291) | /DB_XREF = est: qa90h10.x1 | |
| SEQ ID NOS: 127 | /CLONE = IMAGE: 1694083 /UG = Hs.108885 | |
| (DNA) and 274 | collagen, type VI, alpha 1 | |
| (amino acid) | | |
| CDC42EP3: Cdc42 | gb: AL136842.1 /DEF = Homo sapiens mRNA; | 209288_s_at |
| effector protein 3 | cDNA DKFZp434A0530 (from clone | |
| (LOC10602) | DKFZp434A0530); complete cds. | |
| SEQ ID NOS: 128 | /FEA = mRNA /GEN = DKFZp434A0530 | |
| (DNA) and 275 | /PROD = hypothetical protein | |
| (amino acid) | /DB_XREF = gi: 6807668 /UG = Hs.260024 | |
| | Cdc42 effector protein 3 /FL = gb: AF094521.1 | |
| | gb: AF104857.1 gb: NM_006449.1 | |
| | gb: AF164118.1 gb: AL136842.1 | |
| JTB: jumping | gb: NM_006694.1 /DEF = Homo sapiens | 200048_s_at |
| translocation | jumping translocation breakpoint (JTB), | |
| breakpoint | mRNA. /FEA = mRNA /GEN = JTB | |
| (LOC10899) | /PROD = jumping translocation breakpoint | |
| SEQ ID NOS: 129 | /DB_XREF = gi: 5729888 /UG = Hs.6396 jumping | |
| (DNA) and 276 | translocation breakpoint /FL = gb: BC000499.1 | |
| (amino acid) | gb: BC001363.1 gb: BC000996.2 | |
| | gb: BC001667.1 gb: AB016488.1 | |
| | gb: AF131797.1 gb: NM_006694.1 | |
| | gb: AF115850.2 | |
| CDH2: cadherin 2, | gb: M34064.1 /DEF = Human N-cadherin | 203440_at |
| type 1 preproprotein | mRNA, complete cds. /FEA = mRNA | |
| (LOC1000) | /GEN = NCAD /DB_XREF = gi: 416292 | |
| SEQ ID NOS: 130 | /UG = Hs.161 cadherin 2, type 1, N-cadherin | |
| (DNA) and 277 | (neuronal) /FL = gb: M34064.1 gb: NM_001792.1 | |
| (amino acid) | | |
| MYLK: myosin light | gb: NM_005965.1 /DEF = Homo sapiens myosin, | 202555_s_at |
| chain kinase isoform | light polypeptide kinase (MYLK), mRNA. | |
| 6 (LOC4638) | /FEA = mRNA /GEN = MYLK /PROD = myosin, | |
| SEQ ID NOS: 131 | light polypeptide kinase | |
| (DNA) and 278 | /DB_XREF = gi: 5174600 /UG = Hs.211582 | |
| (amino acid) | myosin, light polypeptide kinase | |
| | /FL = gb: AB037663.1 gb: NM_005965.1 | |
| | gb: AF069601.2 | |
| COL4A1: alpha 1 | Consensus includes gb: NM_001845.1 | 211981_at |
| type IV collagen | /DEF = Homo sapiens collagen, type IV, alpha 1 | |
| preproprotein | (COL4A1), mRNA. /FEA = CDS | |
| (LOC1282) | /GEN = COL4A1 /PROD = collagen, type IV, | |
| SEQ ID NOS: 132 | alpha 1 /DB_XREF = gi: 7656984 | |
| (DNA) and 279 | /UG = Hs.119129 collagen, type IV, alpha 1 | |
| (amino acid) | /FL = gb: NM_001845.1 | |
| PROS1: protein S | gb: NM_000313.1 /DEF = Homo sapiens protein | 207808_s_at |
| (alpha) (LOC5627) | S (alpha) (PROS1), mRNA. /FEA = mRNA | |
| SEQ ID NOS: 133 | /GEN = PROS1 /PROD = protein S (alpha) | |
| (DNA) and 280 | /DB_XREF = gi: 4506116 /UG = Hs.64016 protein | |
| (amino acid) | S (alpha) /FL = gb: M15036.1 gb: NM_000313.1 | |
| EFEMP1: EGF- | gb: NM_004105.2 /DEF = Homo sapiens EGF- | 201843_s_at |
| containing fibulin- | containing fibulin-like extracellular matrix | |
| like extracellular | protein 1 (EFEMP1), transcript variant 1, | |
| matrix protein 1 | mRNA. /FEA = mRNA /GEN = EFEMP1 | |
| isoform a precursor | /PROD = EGF-containing fibulin-like | |
| (LOC2202) | extracellular matrixprotein 1 precursor, isoform | |
| SEQ ID NOS: 134 | a precursor /DB_XREF = gi: 9665261 | |
| (DNA) and 281 | /UG = Hs.76224 EGF-containing fibulin-like | |
| (amino acid) | extracellular matrix protein 1 /FL = gb: U03877.1 | |
| | gb: NM_004105.2 | |
| CCL2: small | Consensus includes gb: S69738.1 /DEF = MCP- | 216598_s_at |
| inducible cytokine A2 | 1 = monocyte chemotactic protein human, aortic | |
| precursor (LOC6347) | endothelial cells, mRNA, 661 nt. /FEA = mRNA | |
| SEQ ID NOS: 135 | /GEN = MCP-1 /PROD = MCP-1 | |
| (DNA) and 282 | /DB_XREF = gi: 545464 /UG = Hs.303649 small | |
| (amino acid) | inducible cytokine A2 (monocyte chemotactic | |
| | protein 1, homologous to mouse Sig-je) | |
| DFNA5: deafness, | gb: NM_004403.1 /DEF = Homo sapiens | 203695_s_at |
| autosomal dominant 5 | deafness, autosomal dominant 5 (DFNA5), | |
| protein (LOC1687) | mRNA. /FEA = mRNA /GEN = DFNA5 | |
| SEQ ID NOS: 136 | /PROD = deafness, autosomal dominant 5 | |
| (DNA) and 283 | protein /DB_XREF = gi: 4758153 /UG = Hs.13530 | |
| (amino acid) | deafness, autosomal dominant 5 | |
| | /FL = gb: AF073308.1 gb: NM_004403.1 | |
| | gb: AF007790.2 | |
| TPM1: tropomyosin 1 | gb: M19267.1 /DEF = Human tropomyosin | 210987_x_at |
| (alpha) (LOC7168) | mRNA, complete cds. /FEA = mRNA | |
| SEQ ID NOS: 137 | /DB_XREF = gi: 339943 /UG = Hs.77899 | |
| (DNA) and 284 | tropomyosin 1 (alpha) /FL = gb: M19267.1 | |
| (amino acid) | | |
| DDAH1: | Consensus includes gb: AL078459 | 209094_at |
| dimethylarginine | /DEF = Human DNA sequence from clone RP4- | |
| dimethylaminohydrolase | 621F18 on chromosome 1p11.4-21.3. Contains | |
| 1 (LOC23576) | the 3 end of the gene for ng, ng | |
| SEQ ID NOS: 138 | dimethylarginine dimethylaminohydrolase (EC | |
| (DNA) and 285 | 3.5.3.18), ESTs, STSs and GSSs /FEA = mRNA | |
| (amino acid) | /DB_XREF = gi: 5791502 /UG = Hs.303180 | |
| | dimethylarginine dimethylaminohydrolase 1 | |
| | /FL = gb: AB001915.1 gb: NM_012137.1 | |
| PMAIP1: phorbol-12- | Consensus includes gb: AI857639 /FEA = EST | 204285_s_at |
| myristate-13-acetate- | /DB_XREF = gi: 5511255 | |
| induced protein 1 | /DB_XREF = est: wk95g09.x1 | |
| (LOC5366) | /CLONE = IMAGE: 2423200 /UG = Hs.96 | |
| SEQ ID NOS: 139 | phorbol-12-myristate-13-acetate-induced | |
| (DNA) and 286 | protein 1 /FL = gb: NM_021127.1 | |
| (amino acid) | | |
| ACOX2: acyl- | gb: NM_003500.1 /DEF = Homo sapiens acyl- | 205364_at |
| Coenzyme A oxidase | Coenzyme A oxidase 2, branched chain | |
| 2, branched chain | (ACOX2), mRNA. /FEA = mRNA | |
| (LOC8309) | /GEN = ACOX2 /PROD = acyl-Coenzyme A | |
| SEQ ID NOS: 140 | oxidase 2, branched chain | |
| (DNA) and 287 | /DB_XREF = gi: 4501868 /UG = Hs.9795 acyl- | |
| (amino acid) | Coenzyme A oxidase 2, branched chain | |
| | /FL = gb: NM_003500.1 | |
| GDI1: GDP | gb: NM_001493.1 /DEF = Homo sapiens GDP | 201864_at |
| dissociation inhibitor | dissociation inhibitor 1 (GDI1), mRNA. | |
| 1 (LOC2664) | /FEA = mRNA /GEN = GDI1 /PROD = GDP | |
| SEQ ID NOS: 141 | dissociation inhibitor 1 /DB_XREF = gi: 4503970 | |
| (DNA) and 288 | /UG = Hs.74576 GDP dissociation inhibitor 1 | |
| (amino acid) | /FL = gb: BC000317.1 gb: NM_001493.1 | |
| | gb: D45021.1 | |
| DPYSL3: | gb: NM_001387.1 /DEF = Homo sapiens | 201431_s_at |
| dihydropyrimidinase- | dihydropyrimidinase-like 3 (DPYSL3), mRNA. | |
| like 3 (LOC1809) | /FEA = mRNA /GEN = DPYSL3 | |
| SEQ ID NOS: 142 | /PROD = dihydropyrimidinase-like 3 | |
| (DNA) and 289 | /DB_XREF = gi: 4503378 /UG = Hs.74566 | |
| (amino acid) | dihydropyrimidinase-like 3 /FL = gb: D78014.1 | |
| | gb: NM_001387.1 | |
| APOC1: | Consensus includes gb: W79394 /FEA = EST | 213553_x_at |
| apolipoprotein C-I | /DB_XREF = gi: 1390665 | |
| precursor (LOC341) | /DB_XREF = est: zd80c07.s1 | |
| SEQ ID NOS: 143 | /CLONE = IMAGE: 346956 /UG = Hs.268571 | |
| (DNA) and 290 | apolipoprotein C-I | |
| (amino acid) | | |
| TTC3: | gb: NM_003316.1 /DEF = Homo sapiens | 208073_x_at |
| tetratricopeptide | tetratricopeptide repeat domain 3 (TTC3), | |
| repeat domain 3 | mRNA. /FEA = mRNA /GEN = TTC3 | |
| (LOC7267) | /PROD = tetratricopeptide repeat domain 3 | |
| SEQ ID NOS: 144 | /DB_XREF = gi: 10835036 /UG = Hs.118174 | |
| (DNA) and 291 | tetratricopeptide repeat domain 3 | |
| (amino acid) | /FL = gb: NM_003316.1 gb: D84295.1 | |
| SNX6: sorting nexin | gb: NM_021249.1 /DEF = Homo sapiens sorting | 217789_at |
| 6 isoform a | nexin 6 (SNX6), mRNA. /FEA = mRNA | |
| (LOC58533) | /GEN = SNX6 /PROD = sorting nexin 6 | |
| SEQ ID NOS: 145 | /DB_XREF = gi: 13027619 /UG = Hs.284291 | |
| (DNA) and 292 | sorting nexin 6 /FL = gb: BC001798.1 | |
| (amino acid) | gb: NM_021249.1 gb: AF121856.1 | |
| CKAP4: | Consensus includes gb: AW029619 /FEA = EST | 200998_s_at |
| transmembrane | /DB_XREF = gi: 5888375 | |
| protein (63 kD), | /DB_XREF = est: wx14e05.x1 | |
| endoplasmic | /CLONE = IMAGE: 2543648 /UG = Hs.74368 | |
| reticulum/Golgi | transmembrane protein (63 kD), endoplasmic | |
| interm (LOC10970) | reticulumGolgi intermediate compartment | |
| SEQ ID NOS: 146 | /FL = gb: NM_006825.1 | |
| (DNA) and 293 | | |
| (amino acid) | | |
| TUBB: tubulin, beta | gb: NM_001069.1 /DEF = Homo sapiens tubulin, | 204141_at |
| polypeptide | beta polypeptide (TUBB), mRNA. | |
| (LOC7280) | /FEA = mRNA /GEN = TUBB /PROD = tubulin, | |
| SEQ ID NOS: 147 | beta polypeptide /DB_XREF = gi: 4507728 | |
| (DNA) and 294 | /UG = Hs.179661 tubulin, beta polypeptide | |
| (amino acid) | /FL = gb: BC001194.1 gb: NM_001069.1 | |

[0044] The biomarkers provided in Table 1, which include the nucleotide sequences of SEQ ID NOS:1-147 and the amino acid sequences of SEQ ID NOS:148-294, referred to herein as a total of 147 biomarkers with reference to the Unigene Title, includes 40 cases where multiple probe sets measure the intensity of a single biomarker (at most, three probe sets for one biomarker). In these cases, the redundant probe sets reference the same full-length cDNA and protein sequences. Table 2 provides a correlation between the NCBI locus IDs and the probe set IDs.

TABLE 2
Correlation between NCBI Locus IDs and Probe Set IDs

| NCBI | Number of | |
|---|---|---|
| Locus ID | Probe sets | Probe set IDs |
| 182 | 3 | 209099_x_at, 209098_s_at, 216268_s_at |
| 1462 | 3 | 204620_s_at, 221731_x_at, 204619_s_at |
| 2316 | 3 | 214752_x_at, 213746_s_at, 200859_x_at |
| 3842 | 3 | 221829_s_at, 207657_x_at, 209226_s_at |
| 9060 | 3 | 203060_s_at, 203059_s_at, 203058_s_at |
| 10899 | 3 | 210434_x_at, 210927_x_at, 200048_s_at |
| 214 | 2 | 201952_at, 201951_at |
| 1291 | 2 | 213428_s_at, 212091_s_at |
| 1508 | 2 | 200839_s_at, 200838_at |
| 1809 | 2 | 201430_s_at, 201431_s_at |
| 2202 | 2 | 201842_s_at, 201843_s_at |
| 2810 | 2 | 33322_i_at, 33323_r_at |
| 3428 | 2 | 206332_s_at, 208966_x_at |
| 3491 | 2 | 201289_at, 210764_s_at |
| 7168 | 2 | 210986_s_at, 210987_x_at |
| 8781 | 2 | 212509_s_at, 205048_s_at |
| 10628 | 2 | 201008_s_at, 201010_s_at |
| 130 | 1 | 211343_s_at |
| 309 | 1 | 200982_s_at |
| 341 | 1 | 213553_x_at |
| 754 | 1 | 200677_at |
| 800 | 1 | 212077_at |
| 999 | 1 | 201131_s_at |
| 1000 | 1 | 203440_at |
| 1075 | 1 | 201487_at |
| 1282 | 1 | 211981_at |
| 1292 | 1 | 209156_s_at |
| 1293 | 1 | 201438_at |
| 1366 | 1 | 202790_at |
| 1490 | 1 | 209101_at |
| 1687 | 1 | 203695_s_at |
| 1808 | 1 | 200762_at |
| 1836 | 1 | 205097_at |
| 2014 | 1 | 203729_at |
| 2115 | 1 | 221911_at |
| 2131 | 1 | 201995_at |
| 2150 | 1 | 213506_at |
| 2273 | 1 | 201540_at |
| 2591 | 1 | 203397_s_at |
| 2664 | 1 | 201864_at |
| 2697 | 1 | 201667_at |
| 2791 | 1 | 204115_at |
| 2887 | 1 | 209409_at |
| 3091 | 1 | 200989_at |
| 3371 | 1 | 201645_at |
| 3383 | 1 | 202637_s_at |
| 3576 | 1 | 211506_s_at |
| 3685 | 1 | 202351_at |
| 3728 | 1 | 201015_s_at |
| 3855 | 1 | 209016_s_at |
| 3856 | 1 | 209008_x_at |
| 3875 | 1 | 201596_x_at |
| 3880 | 1 | 201650_at |
| 3916 | 1 | 201553_s_at |
| 4017 | 1 | 202998_s_at |
| 4131 | 1 | 212233_at |
| 4192 | 1 | 209035_at |
| 4638 | 1 | 202555_s_at |
| 5066 | 1 | 202336_s_at |
| 5270 | 1 | 212190_at |
| 5366 | 1 | 204285_s_at |
| 5376 | 1 | 210139_s_at |
| 5441 | 1 | 211730_s_at |
| 5621 | 1 | 201300_s_at |
| 5627 | 1 | 207808_s_at |
| 5791 | 1 | 221840_at |
| 5834 | 1 | 201481_s_at |
| 6137 | 1 | 212191_x_at |
| 6159 | 1 | 213969_x_at |
| 6280 | 1 | 203535_at |
| 6303 | 1 | 210592_s_at |
| 6347 | 1 | 216598_s_at |
| 6382 | 1 | 201287_s_at |
| 6535 | 1 | 202219_at |
| 6678 | 1 | 200665_s_at |
| 6692 | 1 | 202826_at |
| 6748 | 1 | 201004_at |
| 6768 | 1 | 202005_at |
| 6772 | 1 | 200887_s_at |
| 7045 | 1 | 201506_at |
| 7267 | 1 | 208073_x_at |
| 7280 | 1 | 204141_at |
| 7296 | 1 | 201266_at |
| 7298 | 1 | 202589_at |
| 7345 | 1 | 201387_s_at |
| 7358 | 1 | 203343_at |
| 7846 | 1 | 209118_s_at |
| 8309 | 1 | 205364_at |
| 8829 | 1 | 212298_at |
| 9263 | 1 | 202693_s_at |
| 9540 | 1 | 210609_s_at |
| 10135 | 1 | 217738_at |
| 10602 | 1 | 209288_s_at |
| 10653 | 1 | 210715_s_at |
| 10962 | 1 | 211071_s_at |
| 10970 | 1 | 200998_s_at |
| 11098 | 1 | 202458_at |
| 11199 | 1 | 210143_at |
| 22943 | 1 | 204602_at |
| 23231 | 1 | 212314_at |
| 23362 | 1 | 203354_s_at |
| 23576 | 1 | 209094_at |
| 23643 | 1 | 206584_at |
| 25932 | 1 | 201560_at |
| 26064 | 1 | 202052_s_at |
| 26751 | 1 | 204019_s_at |
| 27122 | 1 | 214247_s_at |
| 28951 | 1 | 202478_at |
| 29984 | 1 | 209885_at |
| 51065 | 1 | 218007_s_at |
| 51454 | 1 | 204237_at |
| 51809 | 1 | 218313_s_at |
| 54407 | 1 | 218041_x_at |
| 55214 | 1 | 218717_s_at |
| 55765 | 1 | 219010_at |
| 56034 | 1 | 218718_at |
| 57111 | 1 | 218186_at |
| 57402 | 1 | 218677_at |
| 58533 | 1 | 217789_at |
| 64759 | 1 | 217853_at |
| 84617 | 1 | 209191_at |
| 113146 | 1 | 212992_at |
| 114299 | 1 | 202760_s_at |
| 347902 | 1 | 222108_at |

[0045] The biomarkers have expression levels in the cells that may be dependent on the activity of the EGFR signal transduction pathway, and that are also highly correlated with EGFR modulator sensitivity exhibited by the cells. Biomarkers serve as useful molecular tools for predicting a response to EGFR modulators, preferably biological molecules, small molecules, and the like that affect EGFR kinase activity via direct or indirect inhibition or antagonism of EGFR kinase function or activity.

EGFR Modulators

[0046] As used herein, the term “EGFR modulator” is intended to mean a compound or drug that is a biological molecule or a small molecule that directly or indirectly modulates EGFR activity or the EGFR signal transduction pathway. Thus, compounds or drugs as used herein is intended to include both small molecules and biological molecules. Direct or indirect modulation includes activation or inhibition of EGFR activity or the EGFR signal transduction pathway. In one aspect, inhibition refers to inhibition of the binding of EGFR to an EGFR ligand such as, for example, EGF. In another aspect, inhibition refers to inhibition of the kinase activity of EGFR.

[0047] EGFR modulators include, for example, EGFR-specific ligands, small molecule EGFR inhibitors, and EGFR monoclonal antibodies. In one aspect, the EGFR modulator inhibits EGFR activity and/or inhibits the EGFR signal transduction pathway. In another aspect, the EGFR modulator is an EGFR monoclonal antibody that inhibits EGFR activity and/or inhibits the EGFR signal transduction pathway.

[0048] EGFR modulators include biological molecules or small molecules. Biological molecules include all lipids and polymers of monosaccharides, amino acids, and nucleotides having a molecular weight greater than 450. Thus, biological molecules include, for example, oligosaccharides and polysaccharides; oligopeptides, polypeptides, peptides, and proteins; and oligonucleotides and polynucleotides. Oligonucleotides and polynucleotides include, for example, DNA and RNA.

[0049] Biological molecules further include derivatives of any of the molecules described above. For example, derivatives of biological molecules include lipid and glycosylation derivatives of oligopeptides, polypeptides, peptides, and proteins.

[0050] Derivatives of biological molecules further include lipid derivatives of oligosaccharides and polysaccharides, e.g., lipopolysaccharides. Most typically, biological molecules are antibodies, or functional equivalents of antibodies. Functional equivalents of antibodies have binding characteristics comparable to those of antibodies, and inhibit the growth of cells that express EGFR. Such functional equivalents include, for example, chimerized, humanized, and single chain antibodies as well as fragments thereof.

[0051] Functional equivalents of antibodies also include polypeptides with amino acid sequences substantially the same as the amino acid sequence of the variable or hypervariable regions of the antibodies. An amino acid sequence that is substantially the same as another sequence, but that differs from the other sequence by means of one or more substitutions, additions, and/or deletions, is considered to be an equivalent sequence. Preferably, less than 50%, more preferably less than 25%, and still more preferably less than 10%, of the number of amino acid residues in a sequence are substituted for, added to, or deleted from the protein.

[0052] The functional equivalent of an antibody is preferably a chimerized or humanized antibody. A chimerized antibody comprises the variable region of a non-human antibody and the constant region of a human antibody. A humanized antibody comprises the hypervariable region (CDRs) of a non-human antibody. The variable region other than the hypervariable region, e.g., the framework variable region, and the constant region of a humanized antibody are those of a human antibody.

[0053] Suitable variable and hypervariable regions of non-human antibodies may be derived from antibodies produced by any non-human mammal in which monoclonal antibodies are made. Suitable examples of mammals other than humans include, for example, rabbits, rats, mice, horses, goats, or primates.

[0054] Functional equivalents further include fragments of antibodies that have binding characteristics that are the same as, or are comparable to, those of the whole antibody. Suitable fragments of the antibody include any fragment that comprises a sufficient portion of the hypervariable (i.e., complementarity determining) region to bind specifically, and with sufficient affinity, to EGFR tyrosine kinase to inhibit growth of cells that express such receptors.

[0055] Such fragments may, for example, contain one or both Fab fragments or the F(ab′)₂ fragment. Preferably, the antibody fragments contain all six complementarity determining regions of the whole antibody, although functional fragments containing fewer than all of such regions, such as three, four, or five CDRs, are also included.

[0056] In one aspect, the fragments are single chain antibodies, or Fv fragments. Single chain antibodies are polypeptides that comprise at least the variable region of the heavy chain of the antibody linked to the variable region of the light chain, with or without an interconnecting linker. Thus, Fv fragment comprises the entire antibody combining site. These chains may be produced in bacteria or in eukaryotic cells.

[0057] The antibodies and functional equivalents may be members of any class of immunoglobulins, such as IgG, IgM, IgA, IgD, or IgE, and the subclasses thereof.

[0058] In one aspect, the antibodies are members of the IgG1 subclass. The functional equivalents may also be equivalents of combinations of any of the above classes and subclasses.

[0059] In one aspect, EGFR antibodies can be selected from chimerized, humanized, fully human, and single chain antibodies derived from the murine antibody 225 described in U.S. Pat. No. 4,943,533 to Mendelsohn et al.

[0060] In another aspect, the EGFR antibody can be selected from the antibodies described in U.S. Pat. No. 6,235,883 to Jakobovits et al., U.S. Pat. No. 5,558,864 to Bendi et al., and U.S. Pat. No. 5,891,996 to Mateo de Acosta del Rio et al.

[0061] In addition to the biological molecules discussed above, the EGFR modulators useful in the invention may also be small molecules. Any molecule that is not a biological molecule is considered herein to be a small molecule. Some examples of small molecules include organic compounds, organometallic compounds, salts of organic and organometallic compounds, saccharides, amino acids, and nucleotides. Small molecules further include molecules that would otherwise be considered biological molecules, except their molecular weight is not greater than 450. Thus, small molecules may be lipids, oligosaccharides, oligopeptides, and oligonucleotides and their derivatives, having a molecular weight of 450 or less.

[0062] It is emphasized that small molecules can have any molecular weight. They are merely called small molecules because they typically have molecular weights less than 450. Small molecules include compounds that are found in nature as well as synthetic compounds. In one embodiment, the EGFR modulator is a small molecule that inhibits the growth of tumor cells that express EGFR. In another embodiment, the EGFR modulator is a small molecule that inhibits the growth of refractory tumor cells that express EGFR.

[0063] Numerous small molecules have been described as being useful to inhibit EGFR. For example, U.S. Pat. No. 5,656,655 to Spada et al. discloses styryl substituted heteroaryl compounds that inhibit EGFR. The heteroaryl group is a monocyclic ring with one or two heteroatoms, or a bicyclic ring with 1 to about 4 heteroatoms, the compound being optionally substituted or polysubstituted.

[0064] U.S. Pat. No. 5,646,153 to Spada et al. discloses bis mono and/or bicyclic aryl heteroaryl, carbocyclic, and heterocarbocyclic compounds that inhibit EGFR.

[0065] U.S. Pat. No. 5,679,683 to Bridges et al. discloses tricyclic pyrimidine compounds that inhibit the EGFR. The compounds are fused heterocyclic pyrimidine derivatives described at column 3, line 35 to column 5, line 6.

[0066] U.S. Pat. No. 5,616,582 to Barker discloses quinazoline derivatives that have receptor tyrosine kinase inhibitory activity.

[0067] Fry et al., Science 265, 1093-1095 (1994) in FIG. 1 discloses a compound having a structure that inhibits EGFR.

[0068] Osherov et al. disclose tyrphostins that inhibit EGFR/HER1 and HER 2, particularly those in Tables I, II, III, and IV.

[0069] U.S. Pat. No. 5,196,446 to Levitzki et al. discloses heteroarylethenediyl or heteroarylethendeiylaryl compounds that inhibit EGFR, particularly from column 2, line 42 to column 3, line 40.

[0070] Panek et al., Journal of Pharmacology and Experimental Therapeutics 283, 1433-1444 (1997) discloses a compound identified as PD166285 that inhibits the EGFR, PDGFR, and FGFR families of receptors. PD166285 is identified as 6-(2,6-dichlorophenyl)-2-(4-(2-diethylaminoethyoxy)phenylamino)-8-methyl-8H-pyrido(2,3-d)pyrimidin-7-one having the structure shown in FIG. 1 on page 1436.

Biomarkers and Biomarker Sets

[0071] The invention includes individual biomarkers and biomarker sets having both diagnostic and prognostic value in disease areas in which signaling through EGFR or the EGFR pathway is of importance, e.g., in cancers or tumors, in immunological disorders, conditions or dysfunctions, or in disease states in which cell signaling and/or cellular proliferation controls are abnormal or aberrant. The biomarker sets comprise a plurality of biomarkers such as, for example, a plurality of the biomarkers provided in Table 1, that highly correlate with resistance or sensitivity to one or more EGFR modulators.

[0072] The biomarker sets of the invention enable one to predict or reasonably foretell the likely effect of one or more EGFR modulators in different biological systems or for cellular responses. The biomarker sets can be used in in vitro assays of EGFR modulator response by test cells to predict in vivo outcome. In accordance with the invention, the various biomarker sets described herein, or the combination of these biomarker sets with other biomarkers or markers, can be used, for example, to predict how patients with cancer might respond to therapeutic intervention with one or more EGFR modulators.

[0073] A biomarker set of cellular gene expression patterns correlating with sensitivity or resistance of cells following exposure of the cells to one or more EGFR modulators provides a useful tool for screening one or more tumor samples before treatment with the EGFR modulator. The screening allows a prediction of cells of a tumor sample exposed to one or more EGFR modulators, based on the expression results of the biomarker set, as to whether or not the tumor, and hence a patient harboring the tumor, will or will not respond to treatment with the EGFR modulator.

[0074] The biomarker or biomarker set can also be used as described herein for monitoring the progress of disease treatment or therapy in those patients undergoing treatment for a disease involving an EGFR modulator.

[0075] The biomarkers also serve as targets for the development of therapies for disease treatment. Such targets may be particularly applicable to treatment of lung disease, such as non-small cell lung cancers or tumors. Indeed, because these biomarkers are differentially expressed in sensitive and resistant cells, their expression patterns are correlated with relative intrinsic sensitivity of cells to treatment with EGFR modulators. Accordingly, the biomarkers highly expressed in resistant cells may serve as targets for the development of new therapies for the tumors which are resistant to EGFR modulators, particularly EGFR inhibitors.

[0076] The level of biomarker protein and/or mRNA can be determined using methods well known to those skilled in the art. For example, quantification of protein can be carried out using methods such as ELISA, 2-dimensional SDS PAGE, Western blot, immunopreciptation, immunohistochemistry, fluorescence activated cell sorting (FACS), or flow cytometry. Quantification of mRNA can be carried out using methods such as PCR, array hybridization, Northern blot, in-situ hybridization, dot-blot, Taqman, or RNAse protection assay.

Microarrays

[0077] The invention also includes specialized microarrays, e.g., oligonucleotide microarrays or cDNA microarrays, comprising one or more biomarkers, showing expression profiles that correlate with either sensitivity or resistance to one or more EGFR modulators. Such microarrays can be employed in in vitro assays for assessing the expression level of the biomarkers in the test cells from tumor biopsies, and determining whether these test cells are likely to be resistant or sensitive to EGFR modulators. For example, a specialized microarray can be prepared using all the biomarkers, or subsets thereof, as described herein and shown in Table 1. Cells from a tissue or organ biopsy can be isolated and exposed to one or more of the EGFR modulators. Following application of nucleic acids isolated from both untreated and treated cells to one or more of the specialized microarrays, the pattern of gene expression of the tested cells can be determined and compared with that of the biomarker pattern from the control panel of cells used to create the biomarker set on the microarray. Based upon the gene expression pattern results from the cells that underwent testing, it can be determined if the cells show a resistant or a sensitive profile of gene expression. Whether or not the tested cells from a tissue or organ biopsy will respond to one or more of the EGFR modulators and the course of treatment or therapy can then be determined or evaluated based on the information gleaned from the results of the specialized microarray analysis.

Antibodies

[0078] The invention also includes antibodies, including polyclonal or monoclonal, directed against one or more of the polypeptide biomarkers. Such antibodies can be used in a variety of ways, for example, to purify, detect, and target the biomarkers of the invention, including both in vitro and in vivo diagnostic, detection, screening, and/or therapeutic methods.

Kits

[0079] The invention also includes kits for determining or predicting whether a patient would be susceptible or resistant to a treatment that comprises one or more EGFR modulators. The patient may have a cancer or tumor such as, for example, a non-small cell lung cancer or tumor. Such kits would be useful in a clinical setting for use in testing a patient's biopsied tumor or other cancer samples, for example, to determine or predict if the patient's tumor or cancer will be resistant or sensitive to a given treatment or therapy with an EGFR modulator. The kit comprises a suitable container that comprises: one or more microarrays, e.g., oligonucleotide microarrays or cDNA microarrays, that comprise those biomarkers that correlate with resistance and sensitivity to EGFR modulators, particularly EGFR inhibitors; one or more EGFR modulators for use in testing cells from patient tissue specimens or patient samples; and instructions for use. In addition, kits contemplated by the invention can further include, for example, reagents or materials for monitoring the expression of biomarkers of the invention at the level of mRNA or protein, using other techniques and systems practiced in the art such as, for example, RT-PCR assays, which employ primers designed on the basis of one or more of the biomarkers described herein, immunoassays, such as enzyme linked immunosorbent assays (ELISAs), immunoblotting, e.g., Western blots, or in situ hybridization, and the like, as further described herein.

Application of Biomarkers and Biomarker Sets

[0080] The biomarkers and biomarker sets may be used in different applications. Biomarker sets can be built from any combination of biomarkers listed in Table 1 to make predictions about the likely effect of any EGFR modulator in different biological systems. The various biomarkers and biomarkers sets described herein can be used, for example, as diagnostic or prognostic indicators in disease management, to predict how patients with cancer might respond to therapeutic intervention with compounds that modulate the EGFR, and to predict how patients might respond to therapeutic intervention that modulates signaling through the entire EGFR regulatory pathway.

[0081] The biomarkers have both diagnostic and prognostic value in diseases areas in which signaling through EGFR or the EGFR pathway is of importance, e.g., in immunology, or in cancers or tumors in which cell signaling and/or proliferation controls have gone awry.

[0082] In accordance with the invention, cells from a patient tissue sample, e.g., a tumor or cancer biopsy, can be assayed to determine the expression pattern of one or more biomarkers prior to treatment with one or more EGFR modulators. In one aspect, the tumor or cancer is NSCLC. Success or failure of a treatment can be determined based on the biomarker expression pattern of the cells from the test tissue (test cells), e.g., tumor or cancer biopsy, as being relatively similar or different from the expression pattern of a control set of the one or more biomarkers. Thus, if the test cells show a biomarker expression profile which corresponds to that of the biomarkers in the control panel of cells which are sensitive to the EGFR modulator, it is highly likely or predicted that the individual's cancer or tumor will respond favorably to treatment with the EGFR modulator. By contrast, if the test cells show a biomarker expression pattern corresponding to that of the biomarkers of the control panel of cells which are resistant to the EGFR modulator, it is highly likely or predicted that the individual's cancer or tumor will not respond to treatment with the EGFR modulator.

[0083] The invention also provides a method of monitoring the treatment of a patient having a disease treatable by one or more EGFR modulators. The isolated test cells from the patient's tissue sample, e.g., a tumor biopsy or tumor sample, can be assayed to determine the expression pattern of one or more biomarkers before and after exposure to an EGFR modulator wherein, preferably, the EGFR modulator is an EGFR inhibitor. The resulting biomarker expression profile of the test cells before and after treatment is compared with that of one or more biomarkers as described and shown herein to be highly expressed in the control panel of cells that are either resistant or sensitive to an EGFR modulator. Thus, if a patient's response is sensitive to treatment by an EGFR modulator, based on correlation of the expression profile of the one or biomarkers, the patient's treatment prognosis can be qualified as favorable and treatment can continue. Also, if, after treatment with an EGFR modulator, the test cells don't show a change in the biomarker expression profile corresponding to the control panel of cells that are sensitive to the EGFR modulator, it can serve as an indicator that the current treatment should be modified, changed, or even discontinued. This monitoring process can indicate success or failure of a patient's treatment with an EGFR modulator and such monitoring processes can be repeated as necessary or desired.

[0084] The biomarkers of the invention can be used to predict an outcome prior to having any knowledge about a biological system. Essentially, a biomarker can be considered to be a statistical tool. Biomarkers are useful primarily in predicting the phenotype that is used to classify the biological system.

[0085] Although the complete function of all of the biomarkers are not currently known, some of the biomarkers are likely to be directly or indirectly involved in the EGFR signaling pathway. In addition, some of the biomarkers may function in metabolic or other resistance pathways specific to the EGFR modulators tested. Notwithstanding, knowledge about the function of the biomarkers is not a requisite for determining the accuracy of a biomarker according to the practice of the invention.

### EXAMPLES

### Example 1

### Identification of Biomarkers

[0086] The biomarkers of Table 1 were identified using three particular approaches. The transcriptional profiling data from primary tumors and cell lines was examined to identify genes with expression that is highly variable across the tumors and cell lines. In addition, attempts were made to determine the IC₅₀ on a panel of cell lines in order to identify genes whose expression profiles correlate with sensitive/resistant classification based on IC₅₀ values. Furthermore, cell lines and xenograft models were treated with the chimeric EGFR antibody cetuximab (marketed as Erbitux®) and the small molecule EGFR inhibitor gefitinib to identify genes that are modulated by EGFR inhibitors.

NSCLC Tumors and Patients

[0087] RNAs from twenty-nine NSCLC adenocarcinoma tumors were obtained (Ardais Corporation, Somerville, Mass.). Adenocarcinomas are the most common sub-type of NSCLC. The median age of the patients was 65 years (range: 43-80 years). The tumors belonged to all size ranges T1-T4 and all stages ranging from Stage IA to Stage IV according to the AJCC classification.

Determination of Relative Drug Sensitivity in NSCLC Cell Lines:

[0088] The NSCLC cell lines were grown using standard cell culture conditions: DMEM supplemented to contain 10% fetal bovine serum, 100 IU/ml penicillin, 100 mg/ml streptomycin and 2 mM L-glutamine (all from Invitrogen Life Technologies, Carlsbad, Calif.). Fourteen non-small cell lung cancer cell lines were examined for their sensitivity to EGFR inhibitor monoclonal antibody cetuximab. Cytotoxicity was assessed in cells by BrdU Cell Proliferation calorimetric ELISA (Roche Applied Science, Indianapolis, Ind.). This is a calorimetric immunoassay for the quantification of cell proliferation based on the measurement of BrdU incorporation during DNA synthesis. To carry out the assays, the NSCLC cells were plated at 2500-5000 cells/well in 96 well microtiter plates and 24 hours later diluted monoclonal antibody drug was added. The concentrations for the EGFR inhibitor cetuximab used in the cytotoxicity assays was 5 μg/ml, 4 μg/ml, 2 μg/ml, 1 μg/ml and 0.5 μg/ml. The cells were incubated at 37° C. for 48 hours at which time the BrdU labeling reagent was added. After two hours the labeling medium was removed and cells were fixed and the DNA was denatured using a FixDenat solution. The anti-BrdU antibody conjugated with peroxidase was added and immune complexes were detected by the subsequent substrate reaction. The reaction product was quantified by measuring the absorbance of the samples in an ELISA reader at 450 μm. The greater the absorbency, the greater the number of live cells. Only two of the fourteen cell lines tested had an IC₅₀ between 4 and 5 μg/ml. The IC₅₀ is the drug concentration required to inhibit cell proliferation to 50% of that of untreated cells. Three to six independent BrdU assays were performed for each cell line.

Resistance/Sensitivity Classification:

[0089] FIG. 1 shows the mRNA level of the epidermal growth factor receptor gene as determined by expression profiling of fourteen NSCLC cell lines that were tested in the BrdU assays described above. Cell lines are shown in order of increasing sensitivity to cetuximab. As shown in FIG. 1, there is no correlation between EGFR level and sensitivity to cetuximab. Of the fourteen NSCLC cell lines tested, ChagoK1 and L2987 were the only two cell lines that consistently showed ≧50% inhibition of cell proliferation at the IC₅₀ concentration of cetuximab. Cell lines SW900, Calu6, SK-MES1, H838 and H661 showed significantly lower than 50% inhibition of cell proliferation at the doses of cetuximab that were tested. The remaining cell lines LX1, H522, H441, H226, A549, SK-LU1 and H2347 showed no inhibition of cell proliferation at the doses of cetuximab that were tested. For the analysis, cell lines ChagoK1 and L2987 were defined as sensitive and the remaining twelve cell lines were defined as resistant.

Gene Expression Profiling:

[0090] RNA for the NSCLC adenocarcinomas was purchased from a commercial vendor as described above. For the NSCLC cell lines, RNA was isolated from 50-70% confluent cells using the RNeasy kits (Qiagen, Valencia, Calif.). The quality of RNA was checked by measuring the 28S:18: ribosomal RNA ratio using an Agilent 2100 Bioanalyzer (Agilent Technologies, Rockville, Md.). Concentration of total RNA was determined spectrophotometrically. 5 or 10 ug of total RNA was used to prepare biotinylated probes according to the Affymetrix Genechip Expression Analysis Technical Manual. Targets were hybridized to human HG-U133A gene chips according to the manufacturer's instructions. Data were preprocessed using the MAS 5.0 software (Affymetrix, Santa Clara, Calif.). The trimmed mean intensity for each chip was scaled to 1,500 to account for minor differences in global chip intensity so that the overall expression level for each sample is comparable.

Data Analysis

[0091] All 22,215 probes (gene sequences) present on the U133A chip were considered as potential predictive biomarkers. To restrict the analysis to gene sequences expressed in at least two of the twenty nine NSCLC tumors, gene sequences with Affymetrix MAS5.0 p>0.04 in at least two tumors or cell lines were removed leaving 14,354 and 13,909 gene sequences, respectively (FIG. 2).

[0092] Next, to identify genes with variable expression in lung tumors (and therefore more likely to be able to correlate with variability in response to treatment), a variance metric (the Weighted spread (90-10) metric) (WSpread (90-10) metric) was used to calculate the variance of probe sets in the tumor and cell line expression profiling data.

$$Weighted spread = \frac{I 90 th percentile - I 10 th percentile}{\sqrt{Imedian}}$$

[0093] I=Signal intensity from expression profiling data

Gene sequences with a WSpread (90-10) metric<30 were removed leaving 4167 gene sequences in the adenocarcinoma tumors (FIG. 3) and 4274 gene sequences in the cell lines (FIG. 4).

[0094] Next, the same expression filter was applied to the remaining 4167 gene sequences using the NSCLC cell line data, resulting in 3572 gene sequences for analysis. This was followed by the application of the same variance metric filter leaving 2496 gene sequences for analysis. Of the 2496 gene sequences, 776 genes sequences ranked in the top 1000 in the cell line variance analysis. These 776 sequences were chosen for further statistical analysis. The 776 gene sequences were subjected to a two-sided unequal variance t-test using the resistance/sensitivity classifications of the cell lines described above (FIG. 1). 147 gene sequences showed a significantly different expression profile between the sensitive and resistant cell lines with a p-value of <0.05 (FIG. 5). Table 1 provides a list of the 147 gene sequences identified using the two-sided unequal variance T-test. These 147 gene sequences (probe sets) represent 124 biomarkers with regard to the Unigene Titles.

[0095] A variation of the gene filtering scheme illustrated in FIG. 1 was conducted and is illustrated in FIG. 2. In this scheme, 343 gene sequences ranked in the top 1000 in both the tumor and cell line variance analysis, a total of 343 out of the 776 genes sequences, were subjected to a two-sided unequal variance T-test. 59 gene sequences showed a significantly different expression profile between the sensitive and resistant cell lines with a p-value of <0.05. These 59 biomarkers are provided in Table 1 as the first 59 biomarkers, i.e., SEQ ID NOS:1-59 and 148-206.

### Example 2

### Experimental Validation of Biomarker Candidates: Cell Line Induction Studies

[0096] Regulation by EGFR inhibitors in drug treated cell lines would lend additional support to the candidate biomarkers as being predictive of response. Induction experiments were carried out in two sensitive cell lines ChagoK1 (sensitive to cetuximab and gefitinib) and L2987 (sensitive to cetuximab, resistant to gefitinib). Induction experiments were also carried out in four cell lines that were resistant to both EGFR inhibitors: A549 and H226 (EGFR+) and LX-1 and H522 (EGFR negative) cell lines.

[0097] Cells were seeded in 6-well tissue culture dishes in DMEM supplemented with 10% FBS (Invitrogen, Carlsbad, Calif.). Twenty-four hours later the cells were switched to DMEM containing 0.5% FBS. The next day cells were treated with either 4 μg/ml cetuximab or 1 μM gefitinib. Twenty-four hours later cells were stimulated with 100 ng/ml human recombinant epidermal growth factor EGF (Biosource International, Camarillo, Calif.) for 6 hours. The cells were lysed directly in the culture dish and RNA isolation was carried out using the RNeasy mini kit (Qiagen, Valencia, Calif.). Profiling was done on U133A GeneChips (Affymetrix, Santa Clara, Calif.). Data was analyzed using GeneChip® Expression Analysis software MAS 5.0 (Affymetrix, Santa Clara, Calif.). Anova analysis of profiling data was done with PartekPro pattern recognition software (Partek, St. Charles, Miss.) using quantile normalized Affymetrix MAS5.0 values for signal intensity.

[0098] Of the 147 probe sets examined, 21 probe sets representing 18 different biomarkers (provided below in Table 3) were highly regulated (Bonferroni p<0.05 in Anova analysis) upon EGFR inhibitor treatment and/or EGF stimulation in the sensitive cell lines.

TABLE 3
Biomarkers Highly Regulated by EGFR Inhibitor Treatment
and/or EGF Stimulation in the Sensitive Cell Lines

| Unigene title and | | Affymetrix |
|---|---|---|
| SEQID NO: | Affymetrix Description | Probe Set |
| DKK1: dickkopf | gb: NM_012242.1 /DEF = Homo sapiens | 204602_at |
| homolog 1 | dickkopf (Xenopus laevis) homolog 1 (DKK1), | |
| (LOC22943) | mRNA. /FEA = mRNA /GEN = DKK1 | |
| SEQ ID NOS: 7 | /PROD = dickkopf (Xenopus laevis) homolog 1 | |
| (DNA) and 154 | /DB_XREF = gi: 7110718 /UG = Hs.40499 | |
| (amino acid) | dickkopf (Xenopus laevis) homolog 1 | |
| | /FL = gb: AF127563.1 gb: AF177394.1 | |
| | gb: NM_012242.1 | |
| S100A9: S100 | gb: NM_002965.2 /DEF = Homo sapiens S100 | 203535_at |
| calcium-binding | calcium-binding protein A9 (calgranulin B) | |
| protein A9 | (S100A9), mRNA. /FEA = mRNA | |
| (LOC6280) | /GEN = S100A9 /PROD = S100 calcium-binding | |
| SEQ ID NOS: 10 | protein A9 /DB_XREF = gi: 9845520 | |
| (DNA) and 157 | /UG = Hs.112405 S100 calcium-binding protein | |
| (amino acid) | A9 (calgranulin B) /FL = gb: M26311.1 | |
| | gb: NM_002965.2 | |
| SFN: stratifin | Cluster Incl. X57348: H. sapiens mRNA (clone | 33322_i_at |
| (LOC2810) | 9112) /cds = (165,911) /gb = X57348 /gi = 23939 | |
| SEQ ID NOS: 11 | /ug = Hs.184510 /len = 1407 | |
| (DNA) and 158 | | |
| (amino acid) | | |
| PBEF: pre-B-cell | Consensus includes gb: BF575514 /FEA = EST | 217738_at |
| colony-enhancing | /DB_XREF = gi: 11649318 | |
| factor isoform a | /DB_XREF = est: 602133090F1 | |
| (LOC10135) | /CLONE = IMAGE: 4288079 /UG = Hs.239138 | |
| SEQ ID NOS: 36 | pre-B-cell colony-enhancing factor | |
| (DNA) and 183 | /FL = gb: U02020.1 gb: NM_005746.1 | |
| (amino acid) | | |
| SERPINE2: | Consensus includes gb: AL541302 /FEA = EST | 212190_at |
| plasminogen activator | /DB_XREF = gi: 12872241 | |
| inhibitor type 1, | /DB_XREF = est: AL541302 | |
| member 2 | /CLONE = CS0DE006YI10 (5 prime) | |
| (LOC5270) | /UG = Hs.21858 trinucleotide repeat containing 3 | |
| SEQ ID NOS: 38 | | |
| (DNA) and 185 | | |
| (amino acid) | | |
| SFN: stratifin | Cluster Incl. X57348: H. sapiens mRNA (clone | 33323_r_at |
| (LOC2810) | 9112) /cds = (165,911) /gb = X57348 /gi = 23939 | |
| SEQ ID NOS: 41 | /ug = Hs.184510 /len = 1407 | |
| (DNA) and 188 | | |
| (amino acid) | | |
| IL8: interleukin 8 | gb: AF043337.1 /DEF = Homo sapiens | 211506_s_at |
| (LOC3576) | interleukin 8 C-terminal variant (IL8) mRNA, | |
| SEQ ID NOS: 44 | complete cds. /FEA = mRNA /GEN = IL8 | |
| (DNA) and 191 | /PROD = interleukin 8 C-terminal variant | |
| (amino acid) | /DB_XREF = gi: 12641914 /UG = Hs.624 | |
| | interleukin 8 /FL = gb: AF043337.1 | |
| CTSC: cathepsin C | gb: NM_001814.1 /DEF = Homo sapiens | 201487_at |
| isoform a | cathepsin C (CTSC), mRNA. /FEA = mRNA | |
| preproprotein | /GEN = CTSC /PROD = cathepsin C | |
| (LOC1075) | /DB_XREF = gi: 4503140 /UG = Hs.10029 | |
| SEQ ID NOS: 46 | cathepsin C /FL = gb: NM_001814.1 | |
| (DNA) and 193 | | |
| (amino acid) | | |
| TXNIP: thioredoxin | Consensus includes gb: AA812232 /FEA = EST | 201008_s_at |
| interacting protein | /DB_XREF = gi: 2881843 | |
| (LOC10628) | /DB_XREF = est: ob84h09.s1 | |
| SEQ ID NOS: 50 | /CLONE = IMAGE: 1338113 /UG = Hs.179526 | |
| (DNA) and 197 | upregulated by 1,25-dihydroxyvitamin D-3 | |
| (amino acid) | /FL = gb: NM_006472.1 gb: S73591.1 | |
| SAT: | gb: M55580.1 /DEF = Human | 210592_s_at |
| spermidine/spermine | spermidinespermine N1-acetyltransferase | |
| N1-acetyltransferase | mRNA, complete cds. /FEA = mRNA | |
| (LOC6303) | /GEN = spermidinespermine N1- | |
| SEQ ID NOS: 54 | acetyltransferase /PROD = spermidinespermine | |
| (DNA) and 201 | N1-acetyltransferase /DB_XREF = gi: 338335 | |
| (amino acid) | /UG = Hs.28491 spermidinespermine N1- | |
| | acetyltransferase /FL = gb: M55580.1 | |
| TXNIP: thioredoxin | gb: NM_006472.1 /DEF = Homo sapiens | 201010_s_at |
| interacting protein | upregulated by 1,25-dihydroxyvitamin D-3 | |
| (LOC10628) | (VDUP1), mRNA. /FEA = mRNA | |
| SEQ ID NOS: 57 | /GEN = VDUP1 /PROD = upregulated by 1,25- | |
| (DNA) and 204 | dihydroxyvitamin D-3 /DB_XREF = gi: 5454161 | |
| (amino acid) | /UG = Hs.179526 upregulated by 1,25- | |
| | dihydroxyvitamin D-3 /FL = gb: NM_006472.1 | |
| | gb: S73591.1 | |
| TENS1: tensin-like | gb: NM_022748.1 /DEF = Homo sapiens | 217853_at |
| SH2 domain- | hypothetical protein FLJ13732 similar to tensin | |
| containing 1 | (FLJ13732), mRNA. /FEA = mRNA | |
| (LOC64759) | /GEN = FLJ13732 /PROD = hypothetical protein | |
| SEQ ID NOS: 66 | FLJ13732 similar to tensin | |
| (DNA) and 213 | /DB_XREF = gi: 12232408 /UG = Hs.12210 | |
| (amino acid) | hypothetical protein FLJ13732 similar to tensin | |
| | /FL = gb: NM_022748.1 | |
| STK17A: | Consensus includes gb: AW194730 /FEA = EST | 202693_s_at |
| serine/threonine | /DB_XREF = gi: 6473630 | |
| kinase 17a | /DB_XREF = est: xn43d11.x1 | |
| (apoptosis-inducing) | /CLONE = IMAGE: 2696469 /UG = Hs.9075 | |
| (LOC9263) | serinethreonine kinase 17a (apoptosis-inducing) | |
| SEQ ID NOS: 69 | /FL = gb: AB011420.1 gb: NM_004760.1 | |
| (DNA) and 216 | | |
| (amino acid) | | |
| TUBB-5: tubulin | gb: BC002654.1 /DEF = Homo sapiens, Similar | 209191_at |
| beta-5 (LOC84617) | to tubulin, beta, 4, clone MGC: 4083, mRNA, | |
| SEQ ID NOS: 84 | complete cds. /FEA = mRNA /PROD = Similar to | |
| (DNA) and 231 | tubulin, beta, 4 /DB_XREF = gi: 12803638 | |
| (amino acid) | /UG = Hs.274398 Homo sapiens, Similar to | |
| | tubulin, beta, 4, clone MGC: 4083, mRNA, | |
| | complete cds /FL = gb: BC002654.1 | |
| TYMS: thymidylate | gb: NM_001071.1 /DEF = Homo sapiens | 202589_at |
| synthetase | thymidylate synthetase (TYMS), mRNA. | |
| (LOC7298) | /FEA = mRNA /GEN = TYMS | |
| SEQ ID NOS: 85 | /PROD = thymidylate synthetase | |
| (DNA) and 232 | /DB_XREF = gi: 4507750 /UG = Hs.82962 | |
| (amino acid) | thymidylate synthetase /FL = gb: BC002567.1 | |
| | gb: NM_001071.1 | |
| RAI14: retinoic acid | gb: NM_015577.1 /DEF = Homo sapiens novel | 202052_s_at |
| induced 14 | retinal pigment epithelial gene (NORPEG), | |
| (LOC26064) | mRNA. /FEA = mRNA /GEN = NORPEG | |
| SEQ ID NOS: 97 | /PROD = DKFZP564G013 protein | |
| (DNA) and 244 | /DB_XREF = gi: 13470085 /UG = Hs.15165 novel | |
| (amino acid) | retinal pigment epithelial gene | |
| | /FL = gb: NM_015577.1 gb: AF155135.1 | |
| CALD1: caldesmon 1 | Consensus includes gb: AL583520 /FEA = EST | 212077_at |
| isoform 3 (LOC800) | /DB_XREF = gi: 12952562 | |
| SEQ ID NOS: 106 | /DB_XREF = est: AL583520 | |
| (DNA) and 253 | /CLONE = CS0DC024YE13 (5 prime) | |
| (amino acid) | /UG = Hs.182183 Homo sapiens mRNA for | |
| | caldesmon, 3 UTR | |
| PALM2: paralemmin | gb: NM_007203.1 /DEF = Homo sapiens A | 202760_s_at |
| 2 (LOC114299) | kinase (PRKA) anchor protein 2 (AKAP2), | |
| SEQ ID NOS: 115 | mRNA. /FEA = mRNA /GEN = AKAP2 | |
| (DNA) and 262 | /PROD = A kinase (PRKA) anchor protein 2 | |
| (amino acid) | /DB_XREF = gi: 6005708 /UG = Hs.42322 A | |
| | kinase (PRKA) anchor protein 2 | |
| | /FL = gb: AB023137.1 gb: NM_007203.1 | |
| TPM1: tropomyosin 1 | gb: Z24727.1 /DEF = H. sapiens tropomyosin | 210986_s_at |
| (alpha) (LOC7168) | isoform mRNA, complete CDS. /FEA = mRNA | |
| SEQ ID NOS: 125 | /PROD = tropomyosin isoform | |
| (DNA) and 272 | /DB_XREF = gi: 854188 /UG = Hs.77899 | |
| (amino acid) | tropomyosin 1 (alpha) /FL = gb: Z24727.1 | |
| TPM1: tropomyosin 1 | gb: M19267.1 /DEF = Human tropomyosin | 210987_x_at |
| (alpha) (LOC7168) | mRNA, complete cds. /FEA = mRNA | |
| SEQ ID NOS: 137 | /DB_XREF = gi: 339943 /UG = Hs.77899 | |
| (DNA) and 284 | tropomyosin 1 (alpha) /FL = gb: M19267.1 | |
| (amino acid) | | |
| TUBB: tubulin, beta | gb: NM_001069.1 /DEF = Homo sapiens tubulin, | 204141_at |
| polypeptide | beta polypeptide (TUBB), mRNA. | |
| (LOC7280) | /FEA = mRNA /GEN = TUBB /PROD = tubulin, | |
| SEQ ID NOS: 147 | beta polypeptide /DB_XREF = gi: 4507728 | |
| (DNA) and 294 | /UG = Hs.179661 tubulin, beta polypeptide | |
| (amino acid) | /FL = gb: BC001194.1 gb: NM_001069.1 | |

[0099] It appears that these biomarkers are likely to be directly or indirectly involved in the EGFR signaling pathway, based on their expression modulation by EGF and/or or EGFR inhibitor treatment.

### Example 3

### Experimental Validation of Biomarker Candidates: Drug Treatment Studies in Lung Xenograft Models

[0100] Regulation by EGFR inhibitors in lung xenograft models would lend additional support to the candidate markers, as being predictive of response. Drug treatment experiments were carried out in the L2987 (sensitive to cetuximab and gefitinib), A549 (borderline sensitive to cetuximab and gefitinib), and LX1 (resistant to cetuximab and gefitinib) lung xenograft models.

In Vivo Antitumor Testing

[0101] Tumors were propagated in nude mice as subcutaneous (sc) transplants using tumor fragments obtained from donor mice. Tumor passage occurred approximately every two to four weeks. Tumors were then allowed to grow to the pre-determined size window (usually between 100-200 mg, tumors outside the range were excluded) and animals were evenly distributed to various treatment and control groups. Animals were treated with cetuximab (1 mg/mouse, q3d×10, 14; ip) or gefitinib (200 mg/kg, q1d14, 14; po). Treated animals were checked daily for treatment related toxicity/mortality. Each group of animals was weighed before the initiation of treatment (Wt1) and then again following the last treatment dose (Wt2). The difference in body weight (Wt2-Wt1) provided a measure of treatment-related toxicity. Tumor response was determined by measurement of tumors with a caliper twice a week, until the tumors reached a predetermined target size of 1 gm or became necrotic. Tumor weights (mg) were estimated from the formula:
Tumor weight=(length×width²)/2
Antitumor activity was determined in terms of primary tumor growth inhibition. This was determined in two ways: (i) calculating the relative median tumor weight (MTW) of treated (T) and control (C) mice at various time points (effects were expressed as % T/C); and (ii) calculating the tumor growth delay (T-C value), defined as the difference in time (days) required for the treated tumors (T) to reach a predetermined target size compared to those of the control group (C). Statistical evaluations of data were performed using Gehan's generalized Wilcoxon test for comparisons of time to reach tumor target size (Gehan 1965). Statistical significance was declared at p<0.05. Antitumor activity was defined as a continuous MTW % T/C≦50% for at least 1 tumor volume doubling time (TVDT) any time after the start of treatment, where TVDT (tumor volume doubling time)=median time (days) for control tumors to reach target size−median time (days) for control tumors to reach half the target size. In addition, treatment groups had to be accompanied by a statistically significant tumor growth delay (T-C value) (p<0.05) to be termed active.

[0102] Treated animals were checked daily for treatment related toxicity/mortality. When death occurred, the day of death was recorded. Treated mice dying prior to having their tumors reach target size were considered to have died from drug toxicity. No control mice died bearing tumors less than target size. Treatment groups with more than one death caused by drug toxicity were considered to have had excessively toxic treatments and their data were not included in the evaluation of the compound's antitumor efficacy.

Drug Treatment Experiments

[0103] L2987 and A549 xenograft animals were dosed with a single dose of either (1) 1 mg/mouse cetuximab, ip; (2) 250 mg/kg gefitinib, po; (3) PEG400/H₂O vehicle, po or 4) PBS vehicle, ip. Each dose was given to three independent mice. At 3 h and 24 h post-treatment the animals were sacrificed and tumors were excised and immediately placed into RNAlater solution (Qiagen, Valencia, Calif.).

[0104] RNA was isolated from the tumors using the RNeasy kits (Qiagen, Valencia, Calif.). The quality and concentration of total RNA was determined as described previously. Profiling was done on U133A GeneChips (Affymetrix, Santa Clara, Calif.). Data was analyzed using GeneChip® Expression Analysis software MAS 5.0 (Affymetrix, Santa Clara, Calif.). Anova analysis of profiling data was done with PartekPro pattern recognition software (Partek, St. Charles, Miss.) using quantile normalized Affymetrix MAS5.0 values for signal intensity.

[0105] Out of 147 probesets examined, 4 probesets representing 3 genes are significantly regulated (p<0.005 in Anova analysis) upon EGFR inhibitor treatment in the sensitive L2987 xenograft but not in the borderline sensitive A549 xenograft. The three genes are jumping translocation breakpoint (JTB), 3-phosphoadenosine 5-phosphosulfate synthase 2 (PAPSS2) and serine protease inhibitor, Kunitz type 1 (SPINT1). It appears that these biomarkers are likely to be directly or indirectly involved in the EGFR signaling pathway, based on their expression modulation by EGFR inhibitor treatment.

### Example 4

### Immunohistochemistry (IHC) Assays in Clinical Samples

[0106] Of the 147 probe sets identified preclinically, S100A9 (Calgranulin B) was chosen to examine whether there was any correlation between expression of a particular protein in the clinical samples and Best Clinical Response data.

Basic IHC Method

[0107] Formalin-fixed, paraffin-embedded tissues were available on slides in 5 μm sections. The sections were deparaffinized with standard xylene and hydrated through graded alcohols into water. Antigen retrieval was performed using proteinase K. Staining was done at room temperature on an automatic staining workstation TechMate 1000 (BioTek Solutions/Ventana Medical Systems, Tucson, Ariz.) by using the Envision peroxidase mouse system (DakoCytomation, Carpinteria, Calif.). Slides were placed three times for 2.5 minutes each in a hydrogen peroxide blocking medium and then allowed to react with mouse anti-human Calgranulin B monoclonal antibody (Bachem Biomedical, Germany) for 60 minutes. Immunodetection was performed with the Envision system by placing slides three times for 5 minutes each in diaminobenzidine (DAB) chromogen substrate. Counterstaining with hematoxylin for 1 minute was the final step. After staining, slides were dehydrated through an alcohol series to absolute ethanol followed by xylene rinses. Slides were permanently coverslipped with glass coverslips and permount medium. Slides were examined under a microscope to assess staining. Positive staining is indicated by the presence of a dark brown chromogen (DAB-Horse Radish Peroxidase reaction product). Hematoxylin counterstain provides a blue nuclear stain to assess cell and tissue morphology. Appropriate positive and negative controls were used. The slides were viewed randomly, without clinical data, by two independent evaluators and scored. A simple scoring system was used to reflect whether a tissue is positive or negative for the marker and to indicate the relative level of staining. A scoring scheme of negative, low, moderate or high was used to indicate the relative percentage of tumor cells staining within the tissues (FIG. 7). The scoring system simply provides an indication of relative expression of a target from tissue to tissue.

Clinical Materials and Criteria for Response

[0108] Formalin-fixed paraffin embedded lung tumor slides were obtained from patients enrolled in a phase II trial of cetuximab. In this trial, cetuximab was used as a single agent therapy for recurrent non-small-cell lung cancer patients (unpublished). The best overall response was recorded from the start of the treatment until disease progression or recurrence. Assessment of response was performed using the RECIST criteria (Response Evaluation Criteria in Solid Tumors, Tsuchida and Therasse, 2001). A partial response (PR) described at least a 30% decrease in the sum of the longest diameter (LD) of target lesions, taking as reference the baseline sum LD. Progressive disease (PD) referred to a 20% or greater increase in the sum of the LD of target lesions, taking as reference the smallest sum LD recorded since the treatment started or the appearance of new lesions. Stable Disease (SD) was used to describe neither sufficient shrinkage to qualify for PR nor sufficient increase to qualify for PD.

Calgranulin B IHC Assay on Clinical FFPET Slides

[0109] Calgranulin B IHC assay was performed on FFPET slides from 39 patients enrolled in the phase II trial of cetuximab in recurrent NSCLC patients (Table 4). Of the 39 patients, 10 were excluded from further analysis because there was no detectable tumor specimen on the slide. The remaining 29 patients that were scored for Calgranulin B staining comprised of 2 PR, 12 SD and 15 PD non-responders based on the clinical response data. The 39 samples used in this IHC analysis were derived from patients for whom tissue samples were available and from whom an informed consent could be obtained. It should be noted that the response data shown here may not reflect the response rate in the entire study.

[0110] Of the 29 patients' slides, 22 were scored as 0, 3 were scored as 0.5+, 3 were scored as 1+ and 1 slide was scored as 2+. Overall 24% of the patients tested were positive for Calgranulin B staining (Table 4).

TABLE 4
IHC Assay Results

| PROGRESSIVE | | | DISEASE | | |
|---|---|---|---|---|---|
| DISEASE | | | STABILIZATION | | |
| | Best | | | Best | |
| | Clinical | | | Clinical | |
| ID | Response | IHC | ID | Response | IHC |
| L8 | PD | negative | L10 | SD | negative |
| L11 | PD | negative | L13 | SD | positive |
| L12 | PD | positive | L40 | SD | negative |
| L14 | PD | negative | L24 | SD | negative |
| L15 | PD | negative | L27 | SD | positive |
| L18 | PD | negative | L47 | SD | positive |
| L20 | PD | negative | L28 | SD | negative |
| L41 | PD | negative | L3 | SD | negative |
| L42 | PD | negative | L4 | SD | negative |
| L44 | PD | negative | L6 | SD | positive |
| L16 | PD | negative | L34 | SD | negative |
| L5 | PD | negative | L39 | SD | positive |
| L33 | PD | negative | L1 | PR | positive |
| L37 | PD | negative | L2 | PR | negative |
| L23B | PD | negative | | | |

[0111] The results are summarized in Table 5 below.

TABLE 5
IHC Assay Results Summary

| | # responders | # non- |
|---|---|---|
| | (PR + SD) | responders |
| Calgranulin B+ | 6 | 1 |
| Calgranulin B− | 9 | 13 |

Of the 7 patients that were Calgranulin B positive, 6 had disease stabilization and 1 was a non-responder having progressive disease (Table 5). The sensitivity of the assay to identify potential responders is 40% [6/(6+9)] and the specificity is 93% [13/(13+1)].

[0112] The positive predictive value of a Calgranulin B IHC assay to identify potential responders is 86% [6/(6+1)] and the negative predictive value=59% [13/(13+9)], {Chi square p value=0.03}.

[0113] Although the data set is small, these results indicate a trend for Calgranulin B positive patients to have disease stabilization.

### Example 5

### Production of Antibodies Against the Biomarkers

[0114] Antibodies against the biomarkers can be prepared by a variety of methods. For example, cells expressing a biomarker polypeptide can be administered to an animal to induce the production of sera containing polyclonal antibodies directed to the expressed polypeptides. In one aspect, the biomarker protein is prepared and isolated or otherwise purified to render it substantially free of natural contaminants, using techniques commonly practiced in the art. Such a preparation is then introduced into an animal in order to produce polyclonal antisera of greater specific activity for the expressed and isolated polypeptide.

[0115] In one aspect, the antibodies of the invention are monoclonal antibodies (or protein binding fragments thereof). Cells expressing the biomarker polypeptide can be cultured in any suitable tissue culture medium, however, it is preferable to culture cells in Earle's modified Eagle's medium supplemented to contain 10% fetal bovine serum (inactivated at about 56° C.), and supplemented to contain about 10 g/l nonessential amino acids, about 1,00 U/ml penicillin, and about 100 μg/ml streptomycin.

[0116] The splenocytes of immunized (and boosted) mice can be extracted and fused with a suitable myeloma cell line. Any suitable myeloma cell line can be employed in accordance with the invention, however, it is preferable to employ the parent myeloma cell line (SP2/0), available from the ATCC (Manassas, Va.). After fusion, the resulting hybridoma cells are selectively maintained in HAT medium, and then cloned by limiting dilution as described by Wands et al. (1981, Gastroenterology, 80:225-232). The hybridoma cells obtained through such a selection are then assayed to identify those cell clones that secrete antibodies capable of binding to the polypeptide immunogen, or a portion thereof.

[0117] Alternatively, additional antibodies capable of binding to the biomarker polypeptide can be produced in a two-step procedure using anti-idiotypic antibodies. Such a method makes use of the fact that antibodies are themselves antigens and, therefore, it is possible to obtain an antibody that binds to a second antibody. In accordance with this method, protein specific antibodies can be used to immunize an animal, preferably a mouse. The splenocytes of such an immunized animal are then used to produce hybridoma cells, and the hybridoma cells are screened to identify clones that produce an antibody whose ability to bind to the protein-specific antibody can be blocked by the polypeptide. Such antibodies comprise anti-idiotypic antibodies to the protein-specific antibody and can be used to immunize an animal to induce the formation of further protein-specific antibodies.

### Example 6

### Immunofluorescence Assays

[0118] The following immunofluorescence protocol may be used, for example, to verify EGFR biomarker protein expression on cells or, for example, to check for the presence of one or more antibodies that bind EGFR biomarkers expressed on the surface of cells. Briefly, Lab-Tek II chamber slides are coated overnight at 4° C. with 10 micrograms/milliliter (μg/ml) of bovine collagen Type II in DPBS containing calcium and magnesium (DPBS++). The slides are then washed twice with cold DPBS++ and seeded with 8000 CHO-CCR5 or CHO pC4 transfected cells in a total volume of 125 μl and incubated at 37° C. in the presence of 95% oxygen/5% carbon dioxide.

[0119] The culture medium is gently removed by aspiration and the adherent cells are washed twice with DPBS++ at ambient temperature. The slides are blocked with DPBS++ containing 0.2% BSA (blocker) at 0-4° C. for one hour. The blocking solution is gently removed by aspiration, and 125 μl of antibody containing solution (an antibody containing solution may be, for example, a hybridoma culture supernatant which is usually used undiluted, or serum/plasma which is usually diluted, e.g., a dilution of about 1/100 dilution). The slides are incubated for 1 hour at 0-4° C. Antibody solutions are then gently removed by aspiration and the cells are washed five times with 400 μl of ice cold blocking solution. Next, 125 μl of 1 μg/ml rhodamine labeled secondary antibody (e.g., anti-human IgG) in blocker solution is added to the cells. Again, cells are incubated for 1 hour at 0-4° C.

[0120] The secondary antibody solution is then gently removed by aspiration and the cells are washed three times with 400 μl of ice cold blocking solution, and five times with cold DPBS++. The cells are then fixed with 125 μl of 3.7% formaldehyde in DPBS++ for 15 minutes at ambient temperature. Thereafter, the cells are washed five times with 400 μl of DPBS++ at ambient temperature. Finally, the cells are mounted in 50% aqueous glycerol and viewed in a fluorescence microscope using rhodamine filters.

What is claimed is:

1. A method for identifying a mammal that will respond therapeutically to a method of treating cancer comprising administering an EGFR modulator, wherein the method comprises:
(a) measuring in the mammal the level of at least one biomarker selected from the biomarkers of Table 1;
(b) exposing a biological sample from said mammal to the EGFR modulator;
(c) following the exposing of step (b), measuring in said biological sample the level of the at least one biomarker,
wherein a difference in the level of the at least one biomarker measured in step (c) compared to the level of the at least one biomarker measured in step (a) indicates that the mammal will respond therapeutically to said method of treating cancer.

2. A method for identifying a mammal that will respond therapeutically to a method of treating cancer comprising administering an EGFR modulator, wherein the method comprises:
(a) exposing a biological sample from the mammal to the EGFR modulator;
(b) following the exposing of step (a), measuring in said biological sample the level of the at least one biomarker selected from the biomarkers of Table 1,
wherein a difference in the level of the at least one biomarker measured in step (b), compared to the level of the at least one biomarker in a mammal that has not been exposed to said EGFR modulator, indicates that the mammal will respond therapeutically to said method of treating cancer.

The application's sequence listing, which the Patent Office published only in electronic form, follows.

SEQUENCE LISTING (294 sequences)

SEQ ID NO: 1 - DNA, 1057 bp, Homo sapiens
gtctcagcggctgccaacagatcatgagccatcagctcctctggggccagctataggacaacagaactctcaccaaaggaccagacacagtgagcaccatgggacagtgtcggtcagccaacgcagaggatgctcaggaattcagtgatgtggagagggccattgagaccctcatcaagaactttcaccagtactccgtggagggtgggaaggagacgctgaccccttctgagctacgggacctggtcacccagcagctgccccatctcatgccgagcaactgtggcctggaagagaaaattgccaacctgggcagctgcaatgactctaaactggagttcaggagtttctgggagctgattggagaagcggccaagagtgtgaagctggagaggcctgtccgggggcactgagaactccctctggaattcttggggggtgttggggagagactgtgggcctggagataaaacttgtctcctctaccaccaccctgtaccctagcctgcacctgtcctcatctctgcaaagttcagcttccttccccaggtctctgtgcactctgtcttggatgctctggggagctcatgggtggaggagtctccaccagagggaggctcaggggactggttgggccagggatgaatatttgagggataaaaattgtgtaagagccaaagaattggtagtagggggagaacagagaggagctgggctatgggaaatgatttgaataatggagctgggaatatggctggatatctggtactaaaaaagggtctttaagaacctacttcctaatctcttccccaatccaaaccatagctgtctgtccagtgctctcttcctgcctccagctctgccccaggctcctcctagactctgtccctgggctagggcaggggaggagggagagcagggttgggggagaggctgaggagagtgtgacatgtggggagaggaccagctgggtgcttgggcattgacagaatgatggttgttttgtatcatttgattaataaaaaaaaatgaaaaaagtgaaaaaaaaaaaaaaaaa

SEQ ID NO: 2 - DNA, 1040 bp, Homo sapiens
gcgaggcgccaccgacgcggaagactataagccccagcgggcgacgaccgaacgcccccgggaacaccgggccccgagctcggtcccgcgcccgaggatcctccacggggctagatggctgcgtcgggggcgggagcggaggtgagcgggcgctagggccgcgagcccccgccggcccttcctccagcgccctgcggaccccgcagaaggcgctcgcctccctagcccgcaaaaacatatcgatttttctcgctgtggcaacggggacgtcctgatagatcctctgctccaataggcaactccggccttccctgccctgacctggaacctctgggagggctgcagagtaagtgccgcctctgcgctccgacggaggcacgaggcctgtggagtaggtccctctgttccgacaggtgcgacacttggcgctccatgcttgcgggtgccgggaggcctggcctcccccagggccgccacctctgctggttgctctgtgctttcaccttaaagctctgccaagcagaggctcccgtgcaggaagagaagctgtcagcaagcacctcaaatttgccatgctggctggtggaagagtttgtggtagcagaagagtgctctccatgctctaatttccgggctaaaactacccctgagtgtggtcccacaggatatgtagagaaaatcacatgcagctcatctaagagaaatgagttcaaaagctgccgctcagctttgatggaacaacgcttattttggaagttcgaaggggctgtcgtgtgtgtggccctgatcttcgcttgtcttgtcatcattcgtcagcgacaattggacagaaaggctctggaaaaggtccggaagcaaatcgagtccatatagctacattccacccttgtatcctgggtcttagagaccctatctcagacagtgaaagtgaaatggactgatttgcactcttggttctttggagccttgtggtggaatccccttttccccatcttcttctttcagatcattaatgagcagaataaaaagagtaaaatggt

SEQ ID NO: 3 - DNA, 4828 bp, Homo sapiens
agtggcgtcggaactgcaaagcacctgtgagcttgcggaagtcagttcagactccagcccgctccagcccggcccgacccgaccgcacccggcgcctgccctcgctcggcgtccccggccagccatgggcccttggagccgcagcctctcggcgctgctgctgctgctgcaggtctcctcttggctctgccaggagccggagccctgccaccctggctttgacgccgagagctacacgttcacggtgccccggcgccacctggagagaggccgcgtcctgggcagagtgaattttgaagattgcaccggtcgacaaaggacagcctatttttccctcgacacccgattcaaagtgggcacagatggtgtgattacagtcaaaaggcctctacggtttcataacccacagatccatttcttggtctacgcctgggactccacctacagaaagttttccaccaaagtcacgctgaatacagtggggcaccaccaccgccccccgccccatcaggcctccgtttctggaatccaagcagaattgctcacatttcccaactcctctcctggcctcagaagacagaagagagactgggttattcctcccatcagctgcccagaaaatgaaaaaggcccatttcctaaaaacctggttcagatcaaatccaacaaagacaaagaaggcaaggttttctacagcatcactggccaaggagctgacacaccccctgttggtgtctttattattgaaagagaaacaggatggctgaaggtgacagagcctctggatagagaacgcattgccacatacactctcttctctcacgctgtgtcatccaacgggaatgcagttgaggatccaatggagattttgatcacggtaaccgatcagaatgacaacaagcccgaattcacccaggaggtctttaaggggtctgtcatggaaggtgctcttccaggaacctctgtgatggaggtcacagccacagacgcggacgatgatgtgaacacctacaatgccgccatcgcttacaccatcctcagccaagatcctgagctccctgacaaaaatatgttcaccattaacaggaacacaggagtcatcagtgtggtcaccactgggctggaccgagagagtttccctacgtataccctggtggttcaagctgctgaccttcaaggtgaggggttaagcacaacagcaacagctgtgatcacagtcactgacaccaacgataatcctccgatcttcaatcccaccacgtacaagggtcaggtgcctgagaacgaggctaacgtcgtaatcaccacactgaaagtgactgatgctgatgcccccaataccccagcgtgggaggctgtatacaccatattgaatgatgatggtggacaatttgtcgtcaccacaaatccagtgaacaacgatggcattttgaaaacagcaaagggcttggattttgaggccaagcagcagtacattctacacgtagcagtgacgaatgtggtaccttttgaggtctctctcaccacctccacagccaccgtcaccgtggatgtgctggatgtgaatgaagcccccatctttgtgcctcctgaaaagagagtggaagtgtccgaggactttggcgtgggccaggaaatcacatcctacactgcccaggagccagacacatttatggaacagaaaataacatatcggatttggagagacactgccaactggctggagattaatccggacactggtgccatttccactcgggctgagctggacagggaggattttgagcacgtgaagaacagcacgtacacagccctaatcatagctacagacaatggttctccagttgctactggaacagggacacttctgctgatcctgtctgatgtgaatgacaacgcccccataccagaacctcgaactatattcttctgtgagaggaatccaaagcctcaggtcataaacatcattgatgcagaccttcctcccaatacatctcccttcacagcagaactaacacacggggcgagtgccaactggaccattcagtacaacgacccaacccaagaatctatcattttgaagccaaagatggccttagaggtgggtgactacaaaatcaatctcaagctcatggataaccagaataaagaccaagtgaccaccttagaggtcagcgtgtgtgactgtgaaggggccgccggcgtctgtaggaaggcacagcctgtcgaagcaggattgcaaattcctgccattctggggattcttggaggaattcttgctttgctaattctgattctgctgctcttgctgtttcttcggaggagagcggtggtcaaagagcccttactgcccccagaggatgacacccgggacaacgtttattactatgatgaagaaggaggcggagaagaggaccaggactttgacttgagccagctgcacaggggcctggacgctcggcctgaagtgactcgtaacgacgttgcaccaaccctcatgagtgtcccccggtatcttccccgccctgccaatcccgatgaaattggaaattttattgatgaaaatctgaaagcggctgatactgaccccacagccccgccttatgattctctgctcgtgtttgactatgaaggaagcggttccgaagctgctagtctgagctccctgaactcctcagagtcagacaaagaccaggactatgactacttgaacgaatggggcaatcgcttcaagaagctggctgacatgtacggaggcggcgaggacgactaggggactcgagagaggcgggccccagacccatgtgctgggaaatgcagaaatcacgttgctggtggtttttcagctcccttcccttgagatgagtttctggggaaaaaaaagagactggttagtgatgcagttagtatagctttatactctctccactttatagctctaataagtttgtgttagaaaagtttcgacttatttcttaaagcttttttttttttcccatcactctttacatggtggtgatgtccaaaagatacccaaattttaatattccagaagaacaactttagcatcagaaggttcacccagcaccttgcagattttcttaaggaattttgtctcacttttaaaaagaaggggagaagtcagctactctagttctgttgttttgtgtatataattttttaaaaaaaatttgtgtgcttctgctcattactacactggtgtgtccctctgcctttttttttttttttaagacagggtctcattctatcggccaggctggagtgcagtggtgcaatcacagctcactgcagccttgtcctcccaggctcaagctatccttgcacctcagcctcccaagtagctgggaccacaggcatgcaccactacgcatgactaattttttaaatatttgagacggggtctccctgtgttacccaggctggtctcaaactcctgggctcaagtgatcctcccatcttggcctcccagagtattgggattacagacatgagccactgcacctgcccagctccccaactccctgccattttttaagagacagtttcgctccatcgcccaggcctgggatgcagtgatgtgatcatagctcactgtaacctcaaactctggggctcaagcagttctcccaccagcctcctttttatttttttgtacagatggggtcttgctatgttgcccaagctggtcttaaactcctggcctcaagcaatccttctgccttggccccccaaagtgctgggattgtgggcatgagctgctgtgcccagcctccatgttttaatatcaactctcactcctgaattcagttgctttgcccaagataggagttctctgatgcagaaattattgggctcttttagggtaagaagtttgtgtctttgtctggccacatcttgactaggtattgtctactctgaagacctttaatggcttccctctttcatctcctgagtatgtaacttgcaatgggcagctatccagtgacttgttctgagtaagtgtgttcattaatgtttatttagctctgaagcaagagtgatatactccaggacttagaatagtgcctaaagtgctgcagccaaagacagagcggaactatgaaaagtgggcttggagatggcaggagagcttgtcattgagcctggcaatttagcaaactgatgctgaggatgattgaggtgggtctacctcatctctgaaaattctggaaggaatggaggagtctcaacatgtgtttctgacacaagatccgtggtttgtactcaaagcccagaatccccaagtgcctgcttttgatgatgtctacagaaaatgctggctgagctgaacacatttgcccaattccaggtgtgcacagaaaaccgagaatattcaaaattccaaattttttcttaggagcaagaagaaaatgtggccctaaagggggttagttgaggggtagggggtagtgaggatcttgatttggatctctttttatttaaatgtgaatttcaacttttgacaatcaaagaaaagacttttgttgaaatagctttactgtttctcaagtgttttggagaaaaaaatcaaccctgcaatcactttttggaattgtcttgatttttcggcagttcaagctatatcgaatatagttctgtgtagagaatgtcactgtagttttgagtgtatacatgtgtgggtgctgataattgtgtattttctttgggggtggaaaaggaaaacaattcaagctgagaaaagtattctcaaagatgcatttttataaattttattaaacaattttgttaaaccataaaaaaaaaaaaa

SEQ ID NO: 4 - DNA, 2037 bp, Homo sapiens
cgcccccgagcagcgcccgcgccctccgcgccttctccgccgggacctcgagcgaaagacgcccgcccgccgcccagccctcgcctccctgcccaccgggcccaccgcgccgccaccccgaccccgctgcgcacggcctgtccgctgcacaccagcttgttggcgtcttcgtcgccgcgctcgccccgggctactcctgcgcgccacaatgagctcccgcatcgccagggcgctcgccttagtcgtcacccttctccacttgaccaggctggcgctctccacctgccccgctgcctgccactgccccctggaggcgcccaagtgcgcgccgggagtcgggctggtccgggacggctgcggctgctgtaaggtctgcgccaagcagctcaacgaggactgcagcaaaacgcagccctgcgaccacaccaaggggctggaatgcaacttcggcgccagctccaccgctctgaaggggatctgcagagctcagtcagagggcagaccctgtgaatataactccagaatctaccaaaacggggaaagtttccagcccaactgtaaacatcagtgcacatgtattgatggcgccgtgggctgcattcctctgtgtccccaagaactatctctccccaacttgggctgtcccaaccctcggctggtcaaagttaccgggcagtgctgcgaggagtgggtctgtgacgaggatagtatcaaggaccccatggaggaccaggacggcctccttggcaaggagctgggattcgatgcctccgaggtggagttgacgagaaacaatgaattgattgcagttggaaaaggcagctcactgaagcggctccctgtttttggaatggagcctcgcatcctatacaaccctttacaaggccagaaatgtattgttcaaacaacttcatggtcccagtgctcaaagacctgtggaactggtatctccacacgagttaccaatgacaaccctgagtgccgccttgtgaaagaaacccggatttgtgaggtgcggccttgtggacagccagtgtacagcagcctgaaaaagggcaagaaatgcagcaagaccaagaaatcccccgaaccagtcaggtttacttacgctggatgtttgagtgtgaagaaataccggcccaagtactgcggttcctgcgtggacggccgatgctgcacgccccagctgaccaggactgtgaagatgcggttccgctgcgaagatggggagacattttccaagaacgtcatgatgatccagtcctgcaaatgcaactacaactgcccgcatgccaatgaagcagcgtttcccttctacaggctgttcaatgacattcacaaatttagggactaaatgctacctgggtttccagggcacacctagacaaacaagggagaagagtgtcagaatcagaatcatggagaaaatgggcgggggtggtgtgggtgatgggactcattgtagaaaggaagccttgctcattcttgaggagcattaaggtatttcgaaactgccaagggtgctggtgcggatggacactaatgcagccacgattggagaatactttgcttcatagtattggagcacatgttactgcttcattttggagcttgtggagttgatgactttctgttttctgtttgtaaattatttgctaagcatattttctctaggcttttttccttttggggttctacagtcgtaaaagagataataagattagttggacagtttaaagcttttattcgtcctttgacaaaagtaaatgggagggcattccatcccttcctgaagggggacactccatgagtgtctgtgagaggcagctatctgcactctaaactgcaaacagaaatcaggtgttttaagactgaatgttttatttatcaaaatgtagcctttggggagggaggggaaatgtaatactggaataatttgtaaatgattttaattttatattcagtgaaaagattttatttatggaattaaccatttaataaagaaatatttacctaataaaaaaaaaaaaaaaaaaa

SEQ ID NO: 5 - DNA, 2691 bp, Homo sapiens
gcttgcccgtcggtcgctagctcgctcggtgcgcgtcgtcccgctccatggcgctcttcgtgcggctgctggctctcgccctggctctggccctgggccccgccgcgaccctggcgggtcccgccaagtcgccctaccagctggtgctgcagcacagcaggctccggggccgccagcacggccccaacgtgtgtgctgtgcagaaggttattggcactaataggaagtacttcaccaactgcaagcagtggtaccaaaggaaaatctgtggcaaatcaacagtcatcagctacgagtgctgtcctggatatgaaaaggtccctggggagaagggctgtccagcagccctaccactctcaaacctttacgagaccctgggagtcgttggatccaccaccactcagctgtacacggaccgcacggagaagctgaggcctgagatggaggggcccggcagcttcaccatcttcgcccctagcaacgaggcctgggcctccttgccagctgaagtgctggactccctggtcagcaatgtcaacattgagctgctcaatgccctccgctaccatatggtgggcaggcgagtcctgactgatgagctgaaacacggcatgaccctcacctctatgtaccagaattccaacatccagatccaccactatcctaatgggattgtaactgtgaactgtgcccggctcctgaaagccgaccaccatgcaaccaacggggtggtgcacctcatcgataaggtcatctccaccatcaccaacaacatccagcagatcattgagatcgaggacacctttgagacccttcgggctgctgtggctgcatcagggctcaacacgatgcttgaaggtaacggccagtacacgcttttggccccgaccaatgaggccttcgagaagatccctagtgagactttgaaccgtatcctgggcgacccagaagccctgagagacctgctgaacaaccacatcttgaagtcagctatgtgtgctgaagccatcgttgcggggctgtctgtagagaccctggagggcacgacactggaggtgggctgcagcggggacatgctcactatcaacgggaaggcgatcatctccaataaagacatcctagccaccaacggggtgatccactacattgatgagctactcatcccagactcagccaagacactatttgaattggctgcagagtctgatgtgtccacagccattgaccttttcagacaagccggcctcggcaatcatctctctggaagtgagcggttgaccctcctggctcccctgaattctgtattcaaagatggaacccctccaattgatgcccatacaaggaatttgcttcggaaccacataattaaagaccagctggcctctaagtatctgtaccatggacagaccctggaaactctgggcggcaaaaaactgagagtttttgtttatcgtaatagcctctgcattgagaacagctgcatcgcggcccacgacaagagggggaggtacgggaccctgttcacgatggaccgggtgctgacccccccaatggggactgtcatggatgtcctgaagggagacaatcgctttagcatgctggtagctgccatccagtctgcaggactgacggagaccctcaaccgggaaggagtctacacagtctttgctcccacaaatgaagccttccgagccctgccaccaagagaacggagcagactcttgggagatgccaaggaacttgccaacatcctgaaataccacattggtgatgaaatcctggttagcggaggcatcggggccctggtgcggctaaagtctctccaaggtgacaagctggaagtcagcttgaaaaacaatgtggtgagtgtcaacaaggagcctgttgccgagcctgacatcatggccacaaatggcgtggtccatgtcatcaccaatgttctgcagcctccagccaacagacctcaggaaagaggggatgaacttgcagactctgcgcttgagatcttcaaacaagcatcagcgttttccagggcttcccagaggtctgtgcgactagcccctgtctatcaaaagttattagagaggatgaagcattagcttgaagcactacaggaggaatgcaccacggcagctctccgccaatttctctcagatttccacagagactgtttgaatgttttcaaaaccaagtatcacactttaatgtacatgggccgcaccataatgagatgtgagccttgtgcatgtgggggaggagggagagagatgtactttttaaatcatgttccccctaaacatggctgttaacccactgcatgcagaaacttggatgtcactgcctgacattcacttccagagaggacctatcccaaatgtggaattgactgcctatgccaagtccctggaaaaggagcttcagtattgtggggctcataaaacatgaatcaagcaatccagcctcatgggaagtcctggcacagtttttgtaaagcccttgcacagctggagaaatggcatcattataagctatgagttgaaatgttctgtcaaatgtgtctcacatctacacgtggcttggaggcttttatggggccctgtccaggtagaaaagaaatggtatgtagagcttagatttccctattgtgacagagccatggtgtgtttgtaataataaaaccaaagaaacata

SEQ ID NO: 6 - DNA, 839 bp, Homo sapiens
aagccacaggctccctggctggcgtcagctaaagtggctgttgggtgtccgcaggcttctgcctggccgccgccgcctataagctaccaggaggagctttacgacttcccgtcctgcgggaagtggcgggcacgatcgcaaggtagcgcagaagcttctcaatggccagcgccagctgcagccccggcggcgcactcgcctcacctgagcctgggaggaaaattcttccaaggatgatctcccactcagagctgaggaagcttttctactcagcagatgctgtgtgttttgatgttgacagcacggtcatcagtgaagaaggaatcggatgctttcattggatttggaggaaatgtgatcaggcaacaagtcaaggataacgccaaatggtatatcactgattttgtagagctgctgggagaaccggaagaataacatccattgtcatacagctccaaacaacttcagatgaatttttacaagttacacagattgatactgtttgcttacaattgcctattacaacttgctataaaaagttggtacagatgatctgcactgtcaagtaaactacagttaggaatcctcaaagattggtttgtttgtttttaactgtagttccagtattatatgatcactatcgatttcctggagagttttgtaatctgaattctttatgtatattcctagctatatttcatacaaagtgttttaagagtggagagtcaattaaacacctttactcttaggaatatagattcggcagccttcagtgaatattggtttttttccctttggtatgtcaataaaagtttatccatgtgtcagaaaaaaaaaaa

SEQ ID NO: 7 - DNA, 1554 bp, Homo sapiens
ggccattaccaatcgcgaaaccccgcagggggctcccggaccctgactctgcagccgaaccggcacggtttcctggggacccaggcttgcaaagtgacggtcattttctccttctttctccctcttgagtccttctgagatgatggctctgggcgcagcgggagctacccgggtctttgtcgcgatggtagcggcggctctcggcggccaccctctgctgggagtgagcgccaccttgaactcggttctcaattccaacgctatcaagaacctgcccccaccgctgggcggcgctgcggggcacccaggctctgcagtcagcgccgcgccgggaatcctgtacccgggcgggaataagtaccagaccattgacaactaccagccgtacccgtgcgcagaggacgaggagtgcggcactgatgagtactgcgctagtcccacccgcggaggggacgcgggcgtgcaaatctgtctcgcctgcaggaagcgccgaaaacgctgcatgcgtcacgctatgtgctgccccgggaattactgcaaaaatggaatatgtgtgtcttctgatcaaaatcatttccgaggagaaattgaggaaaccatcactgaaagctttggtaatgatcatagcaccttggatgggtattccagaagaaccaccttgtcttcaaaaatgtatcacaccaaaggacaagaaggttctgtttgtctccggtcatcagactgtgcctcaggattgtgttgtgctagacacttctggtccaagatctgtaaacctgtcctgaaagaaggtcaagtgtgtaccaagcataggagaaaaggctctcatggactagaaatattccagcgttgttactgtggagaaggtctgtcttgccggatacagaaagatcaccatcaagccagtaattcttctaggcttcacacttgtcagagacactaaaccagctatccaaatgcagtgaactccttttatataatagatgctatgaaaaccttttatgaccttcatcaactcaatcctaaggatatacaagttctgtggtttcagttaagcattccaataacaccttccaaaaacctggagtgtaagagctttgtttctttatggaactcccctgtgattgcagtaaattactgtattgtaaattctcagtgtggcacttacctgtaaatgcaatgaaacttttaattatttttctaaaggtgctgcactgcctatttttcctcttgttatgtaaatttttgtacacattgattgttatcttgactgacaaatattctatattgaactgaagtaaatcatttcagcttatagttcttaaaagcataaccctttaccccatttaattctagagtctagaacgcaaggatctcttggaatgacaaatgataggtacctaaaatgtaacatgaaaatactagcttattttctgaaatgtactatcttaatgcttaaattatatttccctttaggctgtgatagtttttgaaataaaatttaacatttaatatcatgaaaaaaaaaaaaaaaaaaaaaaaaaaaaaaaaaaaaaa

SEQ ID NO: 8 - DNA, 2398 bp, Homo sapiens
cggagggggctcagtccgcagccgccgccgccaccgccgcgcctcggcctcggtgcaggcagcggccgccgccgccgagacagctgcgcgggcgagcatccccacgcagcaccttggaagttgttttcaaccatatccagcctttgccgaatacatcctatctgccacacatccagcgtgaggtccctccagctacaaggtgggcaccatggcggagaagtttgactgccactactgcagggatcccttgcaggggaagaagtatgtgcaaaaggatggccaccactgctgcctgaaatgctttgacaagttctgtgccaacacctgtgtggaatgccgcaagcccatcggtgcggactccaaggaggtgcactataagaaccgcttctggcatgacacctgcttccgctgtgccaagtgccttcaccccttggccaatgagacctttgtggccaaggacaacaagatcctgtgcaacaagtgcaccactcgggaggactcccccaagtgcaaggggtgcttcaaggccattgtggcaggagatcaaaacgtggagtacaaggggaccgtctggcacaaagactgcttcacctgtagtaactgcaagcaagtcatcgggactggaagcttcttccctaaaggggaggacttctactgcgtgacttgccatgagaccaagtttgccaagcattgcgtgaagtgcaacaaggccatcacatctggaggaatcacttaccaggatcagccctggcatgccgattgctttgtgtgtgttacctgctctaagaagctggctgggcagcgtttcaccgctgtggaggaccagtattactgcgtggattgctacaagaactttgtggccaagaagtgtgctggatgcaagaaccccatcactgggtttggtaaaggctccagtgtggtggcctatgaaggacaatcctggcacgactactgcttccactgcaaaaaatgctccgtgaatctggccaacaagcgctttgttttccaccaggagcaagtgtattgtcccgactgtgccaaaaagctgtaaactgacaggggctcctgtcctgtaaaatggcatttgaatctcgttctttgtgtccttactttctgccctataccatcaataggggaagagtggtccttcccttctttaaagttctccttccgtcttttctcccattttacagtattactcaaataagggcacacagtgatcatattagcatttagcaaaaagcaaccctgcagcaaagtgaatttctgtccggctgcaatttaaaaatgaaaacttaggtagattgactcttctgcatgtttctcatagagcagaaaagtgctaatcatttagccacttagtgatgtaagcaagaagcataggagataaaacccccactgagatgcctctcatgcctcagctgggacccaccgtgtagacacacgacatgcaagagttgcagcggctgctccaactcactgctcaccctcttctgtgagcaggaaaagaaccctactgacatgcatggtttaacttcctcatcagaactctgcccttccttctgttcttttgtgctttcaaataactaacacgaacttccagaaaattaacatttgaacttagctgtaattctaaactgacctttccccgtactaacgtttggtttccccgtgtggcatgttttctgagcgttcctactttaaagcatggaacatgcaggtgatttgggaagtgtagaaagacctgagaaaacgagcctgtttcagaggaacatcgtcacaacgaatacttctggaagcttaacaaaactaaccctgctgtcctttttattgtttttaattaatatttttgttttaattgatagcaaaatagtttatgggtttggaaacttgcatgaaaatattttagccccctcagatgttcctgcagtgctgaaattcatcctacggaagtaaccgcaaaactctagagggggagttgagcaggcgccagggctgtcatcaacatggatatgacatttcacaacagtgactagttgaatcccttgtaacgtagtagttgtctgctctttgtccatgtgttaatgaggactgcaaagtcccttctgttgtgattcctaggacttttcctcaagaggaaatctggatttccacctaccgcttacctgaaatgcaggatcacctacttactgtattctacattattatatgacatagtataatgagacaatatcaaaagtaaacatgtaatgacaatacatactaacattcttgtaggagtggttagagaagctgatgcctcatttctacattctgtcattagctattatcatctaacgtttcagtgtatccttacagaaataaagcagcatatgaaaaaaaaaaaaaaaaaaaaaaa

SEQ ID NO: 9 - DNA, 642 bp, Homo sapiens
tcgtgttcatgggagctcgttttcttttcctctaggcagagaagaggcgatggcggcgatggcatctctcggcgccctggcgctgctcctgctgtccagcctctcccgctgctcagccgaggcctgcctggagccccagatcaccccttcctactacaccacttctgacgctgtcatttccactgagaccgtcttcattgtggagatctccctgacatgcaagaacagggtccagaacatggctctctatgctgacgtcggtggaaaacaattccctgtcactcgaggccaggatgtggggcgttatcaggtgtcctggagcctggaccacaagagcgcccacgcaggcacctatgaggttagattcttcgacgaggagtcctacagcctcctcaggaaggctcagaggaataacgaggacatttccatcatcccgcctctgtttacagtcagcgtggaccatcggggcacttggaacgggccctgggtgtccactgaggtgctggctgcggcgatcggccttgtgatctactacttggccttcagtgcgaagagccacatccaggcctgagggcggcaccccagccctgcccttgcttccttcaataaacatcacaggacctgggactgcacaggaaaaaa

SEQ ID NO: 10 - DNA, 576 bp, Homo sapiens
aaacactctgtgtggctcctcggctttgggacagagtgcaagacgatgacttgcaaaatgtcgcagctggaacgcaacatagagaccatcatcaacaccttccaccaatactctgtgaagctggggcacccagacaccctgaaccagggggaattcaaagagctggtgcgaaaagatctgcaaaattttctcaagaaggagaataagaatgaaaaggtcatagaacacatcatggaggacctggacacaaatgcagacaagcagctgagcttcgaggagttcatcatgctgatggcgaggctaacctgggcctcccacgagaagatgcacgagggtgacgagggccctggccaccaccataagccaggcctcggggagggcaccccctaagaccacagtggccaagatcacagtggccacggccatggccacagtcatggtggccacggccacaggccactaatcaggaggccaggccaccctgcctctacccaaccagggccccggggcctgttatgtcaaactgtcttggctgtggggctaggggctggggccaaataaagtctcttcctccaa

SEQ ID NO: 11 - DNA, 1320 bp, Homo sapiens
gagagacacagagtccggcattggtcccaggcagcagttagcccgccgcccgcctgtgtgtccccagagccatggagagagccagtctgatccagaaggccaagctggcagagcaggccgaacgctatgaggacatggcagccttcatgaaaggcgccgtggagaagggcgaggagctctcctgcgaagagcgaaacctgctctcagtagcctataagaacgtggtgggcggccagagggctgcctggagggtgctgtccagtattgagcagaaaagcaacgaggagggctcggaggagaaggggcccgaggtgcgtgagtaccgggagaaggtggagactgagctccagggcgtgtgcgacaccgtgctgggcctgctggacagccacctcatcaaggaggccggggacgccgagagccgggtcttctacctgaagatgaagggtgactactaccgctacctggccgaggtggccaccggtgacgacaagaagcgcatcattgactcagcccggtcagcctaccaggaggccatggacatcagcaagaaggagatgccgcccaccaaccccatccgcctgggcctggccctgaacttttccgtcttccactacgagatcgccaacagccccgaggaggccatctctctggccaagaccactttcgacgaggccatggctgatctgcacaccctcagcgaggactcctacaaagacagcaccctcatcatgcagctgctgcgagacaacctgacactgtggacggccgacaacgccggggaagaggggggcgaggctccccaggagccccagagctgagtgttgcccgccaccgccccgccctgccccctccagtcccccaccctgccgagaggactagtatggggtgggaggccccacccttctcccctaggcgctgttcttgctccaaagggctccgtggagagggactggcagagctgaggccacctggggctggggatcccactcttcttgcagctgttgagcgcacctaaccactggtcatgcccccacccctgctctccgcacccgcttcctcccgaccccaggaccaggctacttctcccctcctcttgcctccctcctgcccctgctgcctctgatcgtaggaattgaggagtgtcccgccttgtggctgagaactggacagtggcaggggctggagatgggtgtgtgtgtgtgtgtgtgtgtgtgtgtgtgcgcgcgcgccagtgcaagaccgagactgagggaaagcatgtctgctgggtgtgaccatgtttcctctcaataaagttcccctgtgacactcaaaaaaaaa

SEQ ID NO: 12 - DNA, 1451 bp, Homo sapiens
cggcccgccctggggaggcgcgcagcagaggctccgattcggggcaggtgagaggctgactttctctcggtgcgtccagtggagctctgagtttcgaatcggtggcggcggattccccgcgcgcccggcgtcggggcttccaggaggatgcggagccccagcgcggcgtggctgctgggggccgccatcctgctagcagcctctctctcctgcagtggcaccatccaaggaaccaatagatcctctaaaggaagaagccttattggtaaggttgatggcacatcccacgtcactggaaaaggagttacagttgaaacagtcttttctgtggatgagttttctgcatctgtcctcactggaaaactgaccacggtcttccttccaattgtctacacaattgtgtttgtggtgggtttgccaagtaacggcatggccctgtgggtctttcttttccgaactaagaagaagcaccctgctgtgatttacatggccaatctggccttggctgacctcctctctgtcatctggttccccttgaagattgcctatcacatacatgccaacaactggatttatggggaagctctttgtaatgtgcttattggctttttctatggcaacatgtactgttccattctcttcatgacctgcctcagtgtgcagaggtattgggtcatcgtgaaccccatggggcactccaggaagaaggcaaacattgccattggcatctccctggcaatatggctgctgattctgctggtcaccatccctttgtatgtcgtgaagcagaccatcttcattcctgccctgaacatcacgacctgtcatgatgttttgcctgagcagctcttggtgggagacatgttcaattacttcctctctctggccattggggtctttctgttcccagccttcctcacagcctctgcctatgtgctgatgatcagaatgctgcgatcttctgccatggatgaaaactcagagaagaaaaggaagagggccatcaaactcattgtcactgtcctggccatgtacctgatctgcttcactcctagtaaccttctgcttgtggtgcattattttctgattaagagccagggccagagccatgtctatgccctgtacattgtagccctctgcctctctacccttaacagctgcatcgacccctttgtctattactttgtttcacatgatttcagggatcatgcaaagaacgctctcctttgccgaagtgtccgcactgtaaagcagatgcaagtatccctcacctcaaagaaacactccaggaaatccagctcttactcttcaagttcaaccactgttaagacctcctattgagttttccaggtcctcagatgggaattgcacagtaggatgtggaacctgtttaatgttatgaggacgtgtctgttatttcctaatcaaaaaggtctcaccacataccaccg

SEQ ID NO: 13 - DNA, 1637 bp, Homo sapiens
ggcaggcatgggagccgcgcgctctctcccggcgcccacacctgtctgagcggcgcagcgagccgcggcccgggcgggctgctcggcgcggaacagtgctcggcatggcagggattccagggctcctcttccttctcttctttctgctctgtgctgttgggcaagtgagcccttacagtgccccctggaaacccacttggcctgcataccgcctccctgtcgtcttgccccagtctaccctcaatttagccaagccagactttggagccgaagccaaattagaagtatcttcttcatgtggaccccagtgtcataagggaactccactgcccacttacgaagaggccaagcaatatctgtcttatgaaacgctctatgccaatggcagccgcacagagacgcaggtgggcatctacatcctcagcagtagtggagatggggcccaacaccgagactcagggtcttcaggaaagtctcgaaggaagcggcagatttatggctatgacagcaggttcagcatttttgggaaggacttcctgctcaactaccctttctcaacatcagtgaagttatccacgggctgcaccggcaccctggtggcagagaagcatgtcctcacagctgcccactgcatacacgatggaaaaacctatgtgaaaggaacccagaagcttcgagtgggcttcctaaagcccaagtttaaagatggtggtcgaggggccaacgactccacttcagccatgcccgagcagatgaaatttcagtggatccgggtgaaacgcacccatgtgcccaagggttggatcaagggcaatgccaatgacatcggcatggattatgattatgccctcctggaactcaaaaagccccacaagagaaaatttatgaagattggggtgagccctcctgctaagcagctgccagggggcagaattcacttctctggttatgacaatgaccgaccaggcaatttggtgtatcgcttctgtgacgtcaaagacgagacctatgacttgctctaccagcaatgcgatgcccagccaggggccagcgggtctggggtctatgtgaggatgtggaagagacagcagcagaagtgggagcgaaaaattattggcattttttcagggcaccagtgggtggacatgaatggttccccacaggatttcaacgtggctgtcagaatcactcctctcaaatatgcccagatttgctattggattaaaggaaactacctggattgtagggaggggtgacacagtgttccctcctggcagcaattaagggtcttcatgttcttattttaggagaggccaaattgttttttgtcattggcgtgcacacgtgtgtgtgtgtgtgtgtgtgtgtgtaaggtgtcttataatcttttacctatttcttacaattgcaagatgactggctttactatttgaaaactggtttgtgtatcatatcatatatcatttaagcagtttgaaggcatacttttgcatagaaataaaaaaaatactgatttggggcaatgaggaatatttgacaattaagttaatcttcacgtttttgcaaactttgatttttatttcatctgaacttgtttcaaagatttatattaaatatttggcatacaagagatatga

SEQ ID NO: 14 - DNA, 3024 bp, Homo sapiens
ggggtcctgcagcctcccgagtgcggagaggcggggccgcccgctgccgcccggctgcctgcgccccctcccgcggccccggctctgggagcggggcgccccgcgcgcgggcacacggcggccagagcgccgaggcggtaccttcagcctgcaatgagaggaacccgggagagcccccgggagccagcgaagagcttggctgctgcgtccagggctgctgctgccgccgcggctgcttgaaactcctcaaagttgagagccggctagagggtgccgcccgccgggagccggagggaaaggaagtcgggaggtgcaagagtgacagacacggacagacggacgcgcagaccttcggaaggcactgcgtaggcagcctccccggagcccacgaggctccccagcaccgttcactggtgggaggctgagccggtggaaaagacaccgggaagagactcagaggcgaccataatgtcgttacgtgtacacactctgcccaccctgcttggagccgtcgtcagaccgggctgcagggagctgctgtgtttgctgatgatcacagtgactgtgggccctggtgcctctggggtgtgccccaccgcttgcatctgtgccactgacatcgtcagctgcaccaacaaaaacctgtccaaggtgcctgggaaccttttcagactgattaagagactggacctgagttataacagaattgggcttctggattctgagtggattccagtatcgtttgcaaagctgaacaccctaattcttcgtcataacaacatcaccagcatttccacgggcagtttttccacaactccaaatttgaagtgtcttgacttatcgtccaataagctgaagacggtgaaaaatgctgtattccaagagttgaaggttctggaagtgcttctgctttacaacaatcacatatcctatctcgatccttcagcgtttggagggctctcccagttgcagaaactctacttaagtggaaattttctcacacagtttccgatggatttgtatgttggaaggttcaagctggcagaactgatgtttttagatgtttcttataaccgaattccttccatgccaatgcaccacataaatttagtgccaggaaaacagctgagaggcatctaccttcatggaaacccatttgtctgtgactgttccctgtactccttgctggtcttttggtatcgtaggcactttagctcagtgatggattttaagaacgattacacctgtcgcctgtggtctgactccaggcactcgcgtcaggtacttctgctccaggatagctttatgaattgctctgacagcatcatcaatggttcctttcgtgcgcttggctttattcatgaggctcaggtcggggaaagactgatggtccactgtgacagcaagacaggtaatgcaaatacggatttcatctgggtgggtccagataacagactgctagagccggataaagagatggaaaacttttacgtgtttcacaatggaagtctggttatagaaagccctcgttttgaggatgctggagtgtattcttgtatcgcaatgaataagcaacgcctgttaaatgaaactgtggacgtcacaataaatgtgagcaatttcactgtaagcagatcccatgctcatgaggcatttaacacagcttttaccactcttgctgcttgcgtggccagtatcgttttggtacttttgtacctctatctgactccatgcccctgcaagtgtaaaaccaagagacagaaaaatatgctacaccaaagcaatgcccattcatcgattctcagtcctggccctgctagtgatgcctccgctgatgaacggaaggcaggtgcaggtaaaagagtggtgtttttggaacccctgaaggatactgcagcagggcagaacgggaaagtcaggctctttcccagcgaggcagtgatagctgagggcatcctaaagtccacgagggggaaatctgactcagattcagtcaattcagtgttttctgacacaccttttgtggcgtccacttaatttgtgcctatatttgtatgatgtcataatttaatctgttcatatttaactttgtgtgtggtctgcaaaataaacagcaggacagaaattgtgttgttttgttctttgaaatacaaccaaattctcttaaaatgattggtaggaaatgaggtaaagtacttcagttcctcaatgtgccagagaaagatggggttgttttccaaagtttaagttctagatcacaatatcttagcttttagcactattggtaatttcagagtaggcccaaaggtgatatgactcccattgtccctttatttaggatattgaaagaaaaaataaactttatgtattagtgtcctttaaaaatagactttgctaacttactagtaccagagttattttaaagaaaaacactagtgtccaatttcatttttaaaagatgtagaaagaagaatcaagcatcaattaattataaagcctaaagcaaagttagatttgggggttattcagccaaaattaccgttttagaccagaatgaatagactacactgataaaatgtactggataatgccacatcctatatggtgttatagaaatagtgcaaggaaagtacatttgtttgcctgtcttttcattttgtacattcttcccattctgtattcttgtacaaaagatctcattgaaaatttaaagtcatcataatttgttgccataaatatgtaagtgtcaataccaaaatgtctgagtaacttcttaaatccctgttctagcaaactaatattggttcatgtgcttgtgtatatgtaaatcttaaattatgtgaactattaaatagaccctactgtactgtgctttggacatttgaattaatgtaaatatatgtaatctgtgacttgatattttgttttatttggctatttaaaaacataaatctaaaatgtcttatgttatcagattatgctattttgtataaagcaccactgatagcaaaaaaaaaaaaaaaa

SEQ ID NO: 15 - DNA, 1753 bp, Homo sapiens
cagccccgcccctacctgtggaagcccagccgcccgctcccgcggataaaaggtgcggagtgtccccgaggtcagcgagtgcgcgctcctcctcgcccgccgctaggtccatcccggcccagccaccatgtccatccacttcagctccccggtattcacctcgcgctcagccgccttctcgggccgcggcgcccaggtgcgcctgagctccgctcgccccggcggccttggcagcagcagcctctacggcctcggcgcctcgcggccgcgcgtggccgtgcgctctgcctatgggggcccggtgggcgccggcatccgcgaggtcaccattaaccagagcctgctggccccgctgcggctggacgccgacccctccctccagcgggtgcgccaggaggagagcgagcagatcaagaccctcaacaacaagtttgcctccttcatcgacaaggtgcggtttctggagcagcagaacaagctgctggagaccaagtggacgctgctgcaggagcagaagtcggccaagagcagccgcctcccagacatctttgaggcccagattgctggccttcggggtcagcttgaggcactgcaggtggatgggggccgcctggaggcggagctgcggagcatgcaggatgtggtggaggacttcaagaataagtacgaagatgaaattaaccgccgcacagctgctgagaatgagtttgtggtgctgaagaaggatgtggatgctgcctacatgagcaaggtggagctggaggccaaggtggatgccctgaatgatgagatcaacttcctcaggaccctcaatgagacggagttgacagagctgcagtcccagatctccgacacatctgtggtgctgtccatggacaacagtcgctccctggacctggacggcatcatcgctgaggtcaaggcacagtatgaggagatggccaaatgcagccgggctgaggctgaagcctggtaccagaccaagtttgagaccctccaggcccaggctgggaagcatggggacgacctccggaatacccggaatgagatttcagagatgaaccgggccatccagaggctgcaggctgagatcgacaacatcaagaaccagcgtgccaagttggaggccgccattgccgaggctgaggagcgtggggagctggcgctcaaggatgctcgtgccaagcaggaggagctggaagccgccctgcagcgggccaagcaggatatggcacggcagctgcgtgagtaccaggaactcatgagcgtgaagctggccctggacatcgagatcgccacctaccgcaagctgctggagggcgaggagagccggttggctggagatggagtgggagccgtgaatatctctgtgatgaattccactggtggcagtagcagtggcggtggcattgggctgaccctcgggggaaccatgggcagcaatgccctgagcttctccagcagtgcgggtcctgggctcctgaaggcttattccatccggaccgcatccgccagtcgcaggagtgcccgcgactgagccgcctcccaccactccactcctccagccaccacccacaatcacaagaagattcccacccctgcctcccatgcctggtcccaagacagtgagacagtctggaaagtgatgtcagaatagcttccaataaagcagcctcattctgaggcctgagtgatccacgtgaaaaaaaaaaaaaaaaaaaaaaaaaaaaaaaaaaaaaaaaaaaaaaaaaaa

SEQ ID NO: 16 - DNA, 1110 bp, Homo sapiens
ctttccgctcggctgttttcctgcgcaggagccgcagggccgtaggcagccatggcgcccagccggaatggcatggtcttgaagccccacttccacaaggactggcagcggcgcgtggccacgtggttcaaccagccggcccgtaagatccgcagacgtaaggcccggcaagccaaggcgcgccgcatcgccccgcgccccgcgtcgggtcccatccggcccatcgtgcgctgccccacggttcggtaccacacgaaggtgcgcgccggccgcggcttcagcctggaggagctcagggtggccggcattcacaagaaggtggcccggaccatcggcatttctgtggatccgaggaggcggaacaagtccacggagtccctgcaggccaacgtgcagcggctgaaggagtaccgctccaaactcatcctcttccccaggaagccctcggcccccaagaagggagacagttctgctgaagaactgaaactggccacccagctgaccggaccggtcatgcccgtccggaacgtctataagaaggagaaagctcgagtcatcactgaggaagagaagaatttcaaagccttcgctagtctccgtatggcccgtgccaacgcccggctcttcggcatacgggcaaaaagagccaaggaagccgcagaacaggatgttgaaaagaaaaaataaagccctcctggggacttggaatcagtcggcagtcatgctgggtctccacgtggtgtgtttcgtgggaacaactgggcctgggatggggcttcactgctgtgacttcctcctgccaggggatttggggctttcttgaaagacagtccaagccctggataatgctttactttctgtgttgaagcactgttggttgtttggttagtgactgatgtaaaacggttttcttgtggggaggttacagaggctgacttcagagtggacttgtgttttttctttttaaagaggcaaggttgggctggtgctcacagctgtaatcccagcactttgaggttggctgggagttcaagaccagcctggccaacatgtcagaactactaaaaataaagaaatcagccatgaaaaaaaaaaaaaaaaaaaaaaaaa

SEQ ID NO: 17 - DNA, 1653 bp, Homo sapiens
agtcagcacgggggtgctggaagagatcgggaataatagcgcagaccaatgagcctagggagatgctttcatcgtctctccttccctcaagtgttctggaacctatcatttgaattagccgagtcaggcaggagggggcggggaatccttccgcccttcttaggaggggctgcattgcagggggagagtgaactgacagactcagtcactgaagagggaaaaggagtgagaagacaaagccgtcaaagccccaacagctttgtatttctccagcccggcgcagaccccggagctcccgaggcactccctccatctttggaacacgccagtaattgattgataacaggaagctatgagggaccctgtgagtagccagtacagttcctttcttttctggaggatgcccatcccagaactggatctgtcggagctggaaggcctgggtctgtcagatacagccacctacaaggtcaaagacagcagcgttggcaaaatgatcgggcaagcaactgcagcagaccaggagaaaaaccctgaaggtgatggcctccttgagtacagcaccttcaacttctggagagctcccattgccagcatccactccttcgaactggacttgctctaaggccaagacttctctctcccatcaccttgccctcattgtcttccctctcaagccccttcctttccactcctttcccattttaatcttgttctctccctactgtgttggtggtgctgatgaatctgccagagttgagttctatgtatttatttatctatctgtctactccatttctctcaaaagccctcaagtcacaaagtaaatggttcaagcaatggagtactgggtcacagggattcctcctttcccccccaaatattaactccagaaactaggcctgactggggacacctgagagtagtatagtagtgcaaaatggaagactgatttttgactctattataatcagcttcagagattccttaaaccttcctaatttcctgctccagggcagtaaacacaaatatttcttcaaggggtgatgaaaacctcggaagttttaatttgaggttatctgctacgaaacagtatttctaaaaggctaaagtgataagtctcttgcttttttttgatcctgctcttatattcttttttttcctcagagaaatcaggagggtagttagaggtataaaacaggaggaaatattatggaaaatgaaaatagggaaaataattgaatcattttagaagtagctaatttcttttctcaaaagagtgtcccttcttcacacctactcactttacaactttgctcctaactgtgggttgaaaactctagctaaagaaagttatcaaatcttaacatgcattcctactattatgatagtttttaaggtttcaattcaatcttctgaacggcataagtcctattttagccttacctcctgcatttgcaatacgtaatactgatcagtgggcacagttcttcagctacattgagaccctgaaatgaacaattatattctgactcgacatcttgtccccaatccttccaaaaatattgatggtgatttgtgctaccatttactcgtttatttaataaagacattcaatcccagaaaaaaaaaaaaaaaaaaaaaaaaaaaaaa

SEQ ID NO: 18 - DNA, 3439 bp, Homo sapiens
gcgcccgcgcctcgggccgtcgggagcggagcctcctcgggaccaggacttcagggccacaggtgctgccaagatgctccagggcacctgctccgtgctcctgctctggggaatcctgggggccatccaggcccagcagcaggaggtcatctcgccggacactaccgagagaaacaacaactgcccagagaagaccgactgccccatccacgtgtacttcgtgctggacacctcggagagcgtcaccatgcagtcccccacggacatcctgctcttccacatgaagcagttcgtgccgcagttcatcagccagctgcagaacgagttctacctggaccaggtggcgctgagctggcgctacggcggcctgcacttctctgaccaggtggaggtgttcagcccaccgggcagcgaccgggcctccttcatcaagaacctgcagggcatcagctccttccgccgcggcaccttcaccgactgcgcgctggccaacatgacggagcagatccggcaggaccgcagcaagggcaccgtccacttcgccgtggtcatcaccgacggccacgtcaccggcagcccctgcgggggcatcaagctgcaggccgagcgggcccgcgaggagggcatccggctcttcgccgtggcccccaaccagaacctgaaggagcagggcctgcgggacatcgccagcacgccgcacgagctctaccgcaacgactacgccaccatgctgcccgactccaccgagatcaaccaggacaccatcaaccgcatcatcaaggtcatgaaacacgaagcctacggagagtgctacaaggtgagctgcctggaaatccctgggccctctgggcccaagggctaccgtggacagaagggtgccaagggcaacatgggtgagccgggagagcctggccagaagggaagacagggagacccgggcatcgaaggccccattggattcccaggacccaagggcgttcctggcttcaaaggagagaagggtgaatttggagccgacggtcgcaagggggcccctggcctggctggcaagaacgggaccgatggacagaagggcaagctggggcgcatcggacctcctggctgcaagggagaccctggaaaccggggccccgacggttacccgggggaagcagggagtccaggggagcgaggagaccaaggcggcaagggggaccctggccgcccaggacgcagagggcccccgggagaaatcggggccaagggaagcaaggggtatcaaggcaacaatggagccccaggaagtcctggtgtgaaaggagccaagggcgggcctgggccccgcggacccaaaggcgagccggggcgcaggggagaccccggcaccaagggcagcccaggcagcgatggccccaagggggagaagggggaccctggccctgagggcccccgcggcctggctggagaggttggcaacaaaggagccaagggagaccgaggcttgcctggacccagaggcccccagggagctcttggggagcccggaaagcagggatctcggggagaccccggtgatgcaggaccccgtggagactcaggacagccaggccccaagggagaccccggcaggcctggattcagctacccaggaccccgaggagcacccggagaaaaaggcgagcccggcccacgcggccccgagggaggccgaggcgactttggcttgaaaggagaacctgggaggaaaggagagaaaggagagcctgcggatcctggtccccctggtgagccaggccctcgggggccaagaggagtcccaggacccgagggtgagcccggcccccctggagaccccggtctcacggagtgtgacgtcatgacctacgtgagggagacctgcgggtgctgcgactgtgagaagcgctgtggcgccctggacgtggtcttcgtcatcgacagctccgagagcattgggtacaccaacttcacactggagaagaacttcgtcatcaacgtggtcaacaggctgggtgccatcgctaaggaccccaagtccgagacagggacgcgtgtgggcgtggtgcagtacagccacgagggcacctttgaggccatccagctggacgacgaacatatcgactccctgtcgagcttcaaggaggctgtcaagaacctcgagtggattgcgggcggcacctggacaccctcagccctcaagtttgcctacgaccgcctcatcaaggagagccggcgccagaagacacgtgtgtttgcggtggtcatcacggacgggcgccacgaccctcgggacgatgacctcaacttgcgggcgctgtgcgatcgcgacgtcacagtgacggccatcggcatcggggacatgttccacgagaagcacgagagtgaaaacctctactccatcgcctgcgacaagccacagcaggtgcgcaacatgacgctgttctccgacctggtcgctgagaagttcatcgatgacatggaggacgtcctctgcccggaccctcagatcgtgtgcccagaccttccctgccaaacagagctgtccgtggcacagtgcacgcagcggcccgtggacatcgtcttcctgctggacggctccgagcggctgggtgagcagaacttccacaaggcccggcgcttcgtggagcaggtggcgcggcggctgacgctggcccggagggacgacgaccctctcaacgcacgcgtggcgctgctgcagtttggtggccccggcgagcagcaggtggccttcccgctgagccacaacctcactgccatccacgaggcgctggagaccacacaatacctgaactccttctcgcacgtgggcgcaggcgtggtgcacgccatcaatgccatcgtgcgcagcccgcgtggcggggcccggaggcacgcagagctgtccttcgtgttcctcacggacggcgtcacgggcaacgacagtctgcacgagtcggcgcactccatgcgcaagcagaacgtggtacccaccgtgctggccttgggcagcgacgtggacatggacgtgctcaccacgctcagcctgggtgaccgcgccgccgtgttccacgagaaggactatgacagcctggcgcaacccggcttcttcgaccgcttcatccgctggatctgctagcgccgccgcccgggccccgcagtcgagggtcgtgagcccaccccgtccatggtgctaagcgggcccgggtcccacacggccagcaccgctgctcactcggacgacgccctgggcctgcacctctccagctcctcccacggggtccccgtagccccggcccccgcccagccccaggtctccccaggccctccgcaggctgcccggcctccctccccctgcagccatcccaaggctcctgacctacctggcccctgagctctggagcaagccctgacccaataaaggctttgaacccaaaaaaaaaaa

SEQ ID NO: 19 - DNA, 4164 bp, Homo sapiens
cactctggctgggagcagaaggcagcctcggtctctgggcggcggcggcggccctctctgccctggccgcgctgtgtggtgaccgcaggcccgagacatgagggcggcccgtgctctgctgcccctgctgctgcaggcctgctggacagccgcgcaggatgagccggagaccccgagggccgtggccttccaggactgccccgtggacctgttctttgtgctggacacctctgagagcgtggccctgaggctgaagccctacggggccctcgtggacaaagtcaagtccttcaccaagcgcttcatcgacaacctgagggacaggtactaccgctgtgaccgaaacctggtgtggaacgcaggcgcgctgcactacagtgacgaggtggagatcatccaaggcctcacgcgcatgcctggcggccgcgacgcactcaaaagcagcgtggacgcggtcaagtactttgggaagggcacctacaccgactgcgctatcaagaaggggctggagcagctcctcgtggggggctcccacctgaaggagaataagtacctgattgtggtgaccgacgggcaccccctggagggctacaaggaaccctgtggggggctggaggatgctgtgaacgaggccaagcacctgggcgtcaaagtcttctcggtggccatcacacccgaccacctggagccgcgtctgagcatcatcgccacggaccacacgtaccggcgcaacttcacggcggctgactggggccagagccgcgacgcagaggaggccatcagccagaccatcgacaccatcgtggacatgatcaaaaataacgttgagcaagtgtgctgctccttcgaatgccagcctgcaagaggacctccgggcctccggggcgaccccggctttgagggagaacgaggcaagccggggctcccaggagagaagggagaagccggagatcctggaagacccggggacctcggacctgttgggtaccagggaatgaagggagaaaaagggagccgtggggagaagggctccaggggaccaaagggctacaagggagagaagggcaagcgtggcatcgacggggtggacggcgtgaagggggagatggggtacccaggcctgccaggctgcaagggctcgccgggttttgacggcattcaaggaccccctggccccaagggagaccccggcgcctttggactgaaaggagaaaagggcgagcctggagctgacggggaggccgggagaccaggagctcggggaccatctggagacgaggggccagccggagagcctgggccccccggagagaaaggagaggcgggcgacgaggggaacccaggacctgacggtgcccccggggagcggggtggccctggagagagaggaccacgggggaccccaggcccgcggggaccaagaggagaccctggtgaagctggcccgcagggtgatcagggaagagaagggcccgttggtgtccctggagacccgggcgaggctggccctatcggacctaaaggctaccgaggcgatgagggtcccccagggtccgagggtgccagaggagccccaggacctgccggaccccctggagacccggggctgatgggagaaaggggagaagacggccccgctggaaatggcaccgagggcttccccggcttccccgggtatcccgggaacaggggcgctcccgggataaacggcacgaagggctaccccggcctcaagggggacgagggagaagccggggaccccggagacgataacaacgacattgcaccccgaggagtcaaaggagcaaaggggtaccggggtcccgagggcccccagggacccccaggacaccaaggaccgcctgggccggacgaatgcgagattttggacatcatcatgaaaatgtgctcttgctgtgaatgcaagtgcggccccatcgacctcctgttcgtgctggacagctcagagagcattggcctgcagaacttcgagattgccaaggacttcgtcgtcaaggtcatcgaccggctgagccgggacgagctggtcaagttcgagccagggcagtcgtacgcgggtgtggtgcagtacagccacagccagatgcaggagcacgtgagcctgcgcagccccagcatccggaacgtgcaggagctcaaggaagccatcaagagcctgcagtggatggcgggcggcaccttcacgggggaggccctgcagtacacgcgggaccagctgctgccgcccagcccgaacaaccgcatcgccctggtcatcactgacgggcgctcagacactcagagggacaccacaccgctcaacgtgctctgcagccccggcatccaggtggtctccgtgggcatcaaagacgtgtttgacttcatcccaggctcagaccagctcaatgtcatttcttgccaaggcctggcaccatcccagggccggcccggcctctcgctggtcaaggagaactatgcagagctgctggaggatgccttcctgaagaatgtcaccgcccagatctgcatagacaagaagtgtccagattacacctgccccatcacgttctcctccccggctgacatcaccatcctgctggacggctccgccagcgtgggcagccacaactttgacaccaccaagcgcttcgccaagcgcctggccgagcgcttcctcacagcgggcaggacggaccccgcccacgacgtgcgggtggcggtggtgcagtacagcggcacgggccagcagcgcccagagcgggcgtcgctgcagttcctgcagaactacacggccctggccagtgccgtcgatgccatggactttatcaacgacgccaccgacgtcaacgatgccctgggctatgtgacccgcttctaccgcgaggcctcgtccggcgctgccaagaagaggctgctgctcttctcagatggcaactcgcagggcgccacgcccgctgccatcgagaaggccgtgcaggaagcccagcgggcaggcatcgagatcttcgtggtggtcgtgggccgccaggtgaatgagccccacatccgcgtcctggtcaccggcaagacggccgagtacgacgtggcctacggcgagagccacctgttccgtgtccccagctaccaggccctgctccgcggtgtcttccaccagacagtctccaggaaggtggcgctgggctagcccaccctgcacgccggcaccaaaccctgtcctcccacccctccccactcatcactaaacagagcccaagcttggaaagccaggacacaacgctgctgcctgctttgtgcagggtcctccggggctcagccctgagttggcatcacctgcgcagggccctctggggctcagctctgagctagtgtcacctgcacagggccctctgaggctcagccctgagctggcgtcacctgtgcagggccctctggggctcagccctgagctggcctcacctgggttccccaccccgggctctcctgccctgccctcctgcccgccctccctcctgcctgcgcagctccttccctaggcacctctgtgctgcatcccaccagcctgagcaagacgcctctcggggcctgtgccgcactagcctccctctcctctgtccccatagctggtttttcccaccaatcctcacctaacagttactttacaattaaactcaaagcaagctcttctcctcagcttggggcagccattggcctctgtctcgttttgggaaaccaaggtcaggaggccgttgcagacataaatctcggcgactcggccccgtctcctgagggtcctgctggtgaccggcctggaccttggccctacagccctggaggccgctgctgaccagcactgaccccgacctcagagagtactcgcaggggcgctggctgcactcaagaccctcgagattaacggtgctaaccccgtctgctcctccctcccgcagagactggggcctggactggacatgagagccccttggtgccacagagggctgtgtcttactagaaacaacgcaaacctctccttcctcagaatagtgatgtgttcgacgttttatcaaaggccccctttctatgttcatgttagttttgctccttctgtgtttttttctgaaccatatccatgttgctgacttttccaaataaaggttttcactcctc

SEQ ID NO: 20 - DNA, 4861 bp, Homo sapiens
cgacgccgccgccttagaacgcctttccagtactgctagcagcagcccgaccacgcgttaccgcacgctcgcgcctttcccttgacacggcggacgccggaggattggggcggcaatttgtcttttccttttttattaaaattatttttcctgcctgttgttggatttggggaaattttttgtttgttttttatgatttgtatttgactgagagaaacccactgaagacgtctgcgtgagaatagagaccaccgaggccgactcgcgggccgctgcacccaccgccaaggacaaaaggagcccagcgctactagctgcacccgattcctcccagtgcttagcatgaagaaggccgaaatgggacgattcagtatttccccggatgaagacagcagcagctacagttccaacagcgacttcaactactcctaccccaccaagcaagctgctctgaaaagccattatgcagatgtagatcctgaaaaccagaactttttacttgaatcgaatttggggaagaagaagtatgaaacagaatttcatccaggtactacttcctttggaatgtcagtatttaatctgagcaatgcgattgtgggcagtggaatccttgggctttcttatgccatggctaatactggaattgctctttttataattctcttgacatttgtgtcaatattttccctgtattctgttcatctccttttgaagactgccaatgaaggagggtctttattatatgaacaattgggatataaggcatttggattagttggaaagcttgcagcatctggatcaattacaatgcagaacattggagctatgtcaagctacctcttcatagtgaaatatgagttgcctttggtgatccaggcattaacgaacattgaagataaaactggattgtggtatctgaacgggaactatttggttctgttggtgtcattggtggtcattcttcctttgtcgctgtttagaaatttaggatatttgggatataccagtggcctttccttgttgtgtatggtgttctttctgattgtggtcatttgcaagaaatttcaggttccgtgtcctgtggaagctgctttgataattaacgaaacaataaacaccaccttaacacagccaacagctcttgtacctgctttgtcacataacgtgactgaaaatgactcttgcagacctcactattttattttcaactcacagactgtctatgctgtgccaattctgatcttttcatttgtctgtcatcctgctgttcttcccatctatgaagaactgaaagaccgcagccgtagaagaatgatgaatgtgtccaagatttcattttttgctatgtttctcatgtatctgcttgccgccctctttggatacctaacattttacgaacatgttgagtcagaattgcttcatacctactcttctatcttgggaactgatattcttcttctcattgtccgtctggctgtgttaatggctgtgaccctgacagtaccagtagttattttcccaatccggagttctgtaactcacttgttgtgtgcatcaaaagatttcagttggtggcgtcatagtctcattacagtgtctatcttggcatttaccaatttacttgtcatctttgtcccaactattagggatatctttggttttattggtgcatctgcagcttctatgttgatttttattcttccttctgccttctatatcaagttggtgaagaaagaacctatgaaatctgtacaaaagattggggctttgttcttcctgttaagtggtgtactggtgatgaccggaagcatggccttgattgttttggattgggtacacaatgcacctggaggtggccattaattggcaccactcaaactcaaactcagtccatctgatgccagtgttgagtaaactcaactactatgaaatttcacctaatgttttcagtttcacttccttttgaagtgcagattcctcgctggttcttctgagtgcagaataagtgaacttttttgttttgttttgtttttttaagaaacttatctgtatgttagaaatggatatgaacaacaaaaccacgagtctcgggttaagggaagtgacaattttattccattccagagaatggacaaactcttaacttttatcaagccacatgcttggctgtgtcattgtttaacttggatattttatgattttacttgaatgtgcctaatggaaccatttgatgtgagaaacaattctttttaatttacagcaaaatattgaataaccattgacaaaaacactattattttttgtaccaaaaatacttaaagacctcagaagcactcttttacttttaagaaattgcttttttgaactttattcagaagcagttatcaataaattccataaaataatgtcattggtatttaaaaatgaatattaatataatgaaatggtttgcctttttgtaggcataataagccaaatacttttttacccaaaataatttttagagaaaatgatgtaatgaaaaattgtaccatgaattaggagcatagttttttccatttaaacgtcaccattacttaaaagatgattgattattgctataccaaatcagatgaactctgttcatcacttttcttctctgtccccaaacaatttggttcattcagactgaaatgtttgtgtcttcaacttattagaatggaagataatgcagatatttctgtgggaaataaaataactaattttgaggtaccaaatagtgcaattgggtaaaacagggtttattcagttgcatctgtctccagtgttgtattgacagctctgggtctttttttgggccagcccttttttgacattgcttccagcagtggaaaatgggcatttgatggcaataggccaaaattattgtgtccagagagtacactttttcaaaatgctcacctactggaagtgtgaattacttgacaatgtatggcttagttgtgttcatgttttgtctacagtagaggtctaatccacaggttacacctatgtttgatatgatataagttctctttgcgtaggccactgggtttctcatgcagtaagctttataaaaactcatttgcactggactgtcatctcattcttgtacaacgtagaattacttgtttacatccaacaaatggttagctagggaaaacagtgcaaactgagtgttagtagtcattttggtccaactgcatgtcaacccttccatttcaatcccagttagaaatgaaaataattactttgaaacttggctttaagagcacatttatcgtacgtcacagtgtatggtgaatatattattaaataatgtggtacttcgctcatcaggcataatgtctaaaatctaatatacataattccattaagtggttgaaggaagcaaataatggaattgtcaattggtcatctggctgtaaggtttgcccttgaactaaaaatgttgtttggggcaagggccagaaatgtggagacatggtttttgttacgcattcttgtattatatgtgactaaatttacaaacaagatacatgtgtaattaaagacccttatggaactggaagacgtcttgtagtgctacattgggtgaaaccgttggtccatttttgtctgtttctatgaagataaaataattgggggccatctagaaatagaaaggcagtgggaagacagattctacggcactgctttcatttaattgggctttaggcactccattcgaatgcagaacctcacctctagttgagaccaagaattggcaaatttgcatgagctcctggaaagagttgctgactttgtatctaagacctgccagggaataccaagagttgtttctacagacttttttttttttttgtatgggagaagatactgtggcaaccaggaaggaatggaaaaaaaattcttttctctacagcaaattaatgtgaggaagctcctccaatcctctggctatttaaggttcaaaatcaagtgcctagggaaaattccaatggatgattttctgggagctatcttgtctaccttgaggttcctgaacaatgaattcccattaatgagcagtcttcagtattaaaaccactgtcttgtcacctcattttgcattactgtcttccgtggatgtttcagttacaactgtaatgttatttatagaacaacattaatccattaaagctaacctatttttcaatatttatgataatctatgtacatatattgtctgtccatatgtatttgtaaataggttgtatataatgtcaggtttgggtcttgggttcaagtgtatatattcctgtaagtttcttaactgcattttgatgaattcacattatgtaactataagaattgtcccaaaagtacctgtacagaaaattgaatattgaaaaattgacaaattgtgtacaaacactaaaaaaaacttgtttaaattgtatttgcaataaacaacatcaaattttttcatgaaatcttggtacaaattcagatctcttatttaaaatttaaataaggaatacattttcaaaatgcagtaatcaaaatgtgatctagtgtaatgaaataaaatgtgatctagtgtaatggaagacctttgagaacctgggtgtattaactttgtgtatatagtgtaaatatccccactgtactgttagaggccaacaattctagtatggcttgttggcaaagagtgctacaccgtttcaatgaaacaatgtatgtttgttttaactgaactaaaataaatacatgcttaatcctgaaaaaaaaaaaaaaaaaaaaaaaaaaaaaaaaaaaaaaaaaaaaaaaaaaaaaaaaaaaaaaaaaaaaaaaaaaaaaa

SEQ ID NO: 21 - DNA, 2415 bp, Homo sapiens
gtccggcagccgctgctgctgctgctgctgctgctgccgccgccgccgccgccgtccctgcgtccttcggtctctgctcccgggacccgggctccgccgcagccagccagcatgtcggggatcaagaagcaaaagacggagaaccagcagaaatccaccaatgtagtctatcaggcccaccatgtgagcaggaataagagagggcaagtggttggaacaaggggtgggttccgaggatgtaccgtgtggctaacaggtctctctggtgctggaaaaacaacgataagttttgccctggaggagtaccttgtctcccatgccatcccttgttactccctggatggggacaatgtccgtcatggccttaacagaaatctcggattctctcctggggacagagaggaaaatatccgccggattgctgaggtggctaagctgtttgctgatgctggtctggtctgcattaccagctttatttctccattcgcaaaggatcgtgagaatgcccgcaaaatacatgaatcagcagggctgccattctttgaaatatttgtagatgcacctctaaatatttgtgaaagcagagacgtaaaaggcctctataaaagggccagagctggggagattaaaggatttacaggtattgattctgattatgagaaacctgaaactcctgagcgtgtgcttaaaaccaatttgtccacagtgagtgactgtgtccaccaggtagtggaacttctgcaagagcagaacattgtaccctatactataatcaaagatatccacgaactctttgtgccggaaaacaaacttgaccacgtccgagctgaggctgaaactctcccttcattatcaattactaagctggatctccagtgggtccaggttttgagcgaaggctgggccactcccctcaaaggtttcatgcgggagaaggagtacttacaggttatgcactttgacaccctgctagatgatggcgtgatcaacatgagcatccccattgtactgcccgtctctgcagaggataagacacggctggaagggtgcagcaagtttgtcctggcacatggtggacggagggtagctatcttacgagacgctgaattctatgaacacagaaaagaggaacgctgttcccgtgtttgggggacaacatgtacaaaacacccccatatcaaaatggtgatggaaagtggggactggctggttggtggagaccttcaggtgctggagaaaataagatggaatgatgggctggaccaataccgtctgacacctctggagctcaaacagaaatgtaaagaaatgaatgctgatgcggtgtttgcattccagttgcgcaatcctgtccacaatggccatgccctgttgatgcaggacactcgccgcaggctcctagagaggggctacaagcacccggtcctcctactacaccctctgggcggctggaccaaggatgacgatgtgcctctagactggcggatgaagcagcacgcggctgtgctcgaggaaggggtcctggatcccaagtcaaccattgttgccatctttccgtctcccatgttatatgctggccccacagaggtccagtggcactgcaggtcccggatgattgcgggtgccaatttctacattgtggggagggaccctgcaggaatgccccatcctgaaaccaagaaggatctgtatgaacccactcatgggggcaaggtcttgagcatggcccctggcctcacctctgtggaaatcattccattccgagtggctgcctacaacaaagccaaaaaagccatggacttctatgatccagcaaggcacaatgagtttgacttcatctcaggaactcgaatgaggaagctcgcccgggaaggagagaatcccccagatggcttcatggcccccaaagcatggaaggtcctgacagattattacaggtccctggagaagaactaagcctttggctccagagtttctttctgaagtgctctttgattaccttttctatttttatgattagatgctttgtattaaattgcttctcaatgatgcattttaatcttttataatgaagtaaaagttgtgtctataattaaaaaaaaatatatatatatacacacacacatatacatacaaagtcaaactgaagaccaaatcttagcaggtaaaagcaatattcttatacatttcataataaaattagctctatgtattttctactgcacctgagcaggcaggtcccagatttcttaaggctttgtttgaccatgtgtctagttacttgctgaaaagtgaatatattttccagcatgtcttgacaacctgtactcttccaatgtcatttatcagttgtaaaatatatcagattgtgtcctcttctgtacaattgacaaaaaaaaaaaaaaaaaaaaaaaa

SEQ ID NO: 22 - DNA, 5896 bp, Homo sapiens
ctgcggccggcccgcgagctaggctgggtttttttttttctcccctccctcccccctttttccatgcagctgatctaaaagggaataaaaggctgcgcataatcataataataaaagaaggggagcgcgagagaaggaaagaaagccgggaggtggaagaggagggggagcgtctcaaagaagcgatcagaataataaaaggaggccgggctctttgccttctggaacgggccgctcttgaaagggcttttgaaaagtggtgttgttttccagtcgtgcatgctccaatcggcggagtatattagagccgggacgcggcggccgcaggggcagcggcgacggcagcaccggcggcagcaccagcgcgaacagcagcggcggcgtcccgagtgcccgcggcgcgcggcgcagcgatgcgttccccacggacgcgcggccggtccgggcgccccctaagcctcctgctcgccctgctctgtgccctgcgagccaaggtgtgtggggcctcgggtcagttcgagttggagatcctgtccatgcagaacgtgaacggggagctgcagaacgggaactgctgcggcggcgcccggaacccgggagaccgcaagtgcacccgcgacgagtgtgacacatacttcaaagtgtgcctcaaggagtatcagtcccgcgtcacggccggggggccctgcagcttcggctcagggtccacgcctgtcatcgggggcaacaccttcaacctcaaggccagccgcggcaacgaccgcaaccgcatcgtgctgcctttcagtttcgcctggccgaggtcctatacgttgcttgtggaggcgtgggattccagtaatgacaccgttcaacctgacagtattattgaaaaggcttctcactcgggcatgatcaaccccagccggcagtggcagacgctgaagcagaacacgggcgttgcccactttgagtatcagatccgcgtgacctgtgatgactactactatggctttggctgcaataagttctgccgccccagagatgacttctttggacactatgcctgtgaccagaatggcaacaaaacttgcatggaaggctggatgggccccgaatgtaacagagctatttgccgacaaggctgcagtcctaagcatgggtcttgcaaactcccaggtgactgcaggtgccagtatggctggcaaggcctgtactgtgataagtgcatcccacacccgggatgcgtccacggcatctgtaatgagccctggcagtgcctctgtgagaccaactggggcggccagctctgtgacaaagatctcaattactgtgggactcatcagccgtgtctcaacgggggaacttgtagcaacacaggccctgacaaatatcagtgttcctgccctgaggggtattcaggacccaactgtgaaattgctgagcacgcctgcctctctgatccctgtcacaacagaggcagctgtaaggagacctccctgggctttgagtgtgagtgttccccaggctggaccggccccacatgctctacaaacattgatgactgttctcctaataactgttcccacgggggcacctgccaggacctggttaacggatttaagtgtgtgtgccccccacagtggactgggaaaacgtgccagttagatgcaaatgaatgtgaggccaaaccttgtgtaaacgccaaatcctgtaagaatctcattgccagctactactgcgactgtcttcccggctggatgggtcagaattgtgacataaatattaatgactgccttggccagtgtcagaatgacgcctcctgtcgggatttggttaatggttatcgctgtatctgtccacctggctatgcaggcgatcactgtgagagagacatcgatgaatgtgccagcaacccctgtttgaatgggggtcactgtcagaatgaaatcaacagattccagtgtctgtgtcccactggtttctctggaaacctctgtcagctggacatcgattattgtgagcctaatccctgccagaacggtgcccagtgctacaaccgtgccagtgactatttctgcaagtgccccgaggactatgagggcaagaactgctcacacctgaaagaccactgccgcacgaccccctgtgaagtgattgacagctgcacagtggccatggcttccaacgacacacctgaaggggtgcggtatatttcctccaacgtctgtggtcctcacgggaagtgcaagagtcagtcgggaggcaaattcacctgtgactgtaacaaaggcttcacgggaacatactgccatgaaaatattaatgactgtgagagcaacccttgtagaaacggtggcacttgcatcgatggtgtcaactcctacaagtgcatctgtagtgacggctgggagggggcctactgtgaaaccaatattaatgactgcagccagaacccctgccacaatgggggcacgtgtcgcgacctggtcaatgacttctactgtgactgtaaaaatgggtggaaaggaaagacctgccactcacgtgacagtcagtgtgatgaggccacgtgcaacaacggtggcacctgctatgatgagggggatgcttttaagtgcatgtgtcctggcggctgggaaggaacaacctgtaacatagcccgaaacagtagctgcctgcccaacccctgccataatgggggcacatgtgtggtcaacggcgagtcctttacgtgcgtctgcaaggaaggctgggaggggcccatctgtgctcagaataccaatgactgcagccctcatccctgttacaacagcggcacctgtgtggatggagacaactggtaccggtgcgaatgtgccccgggttttgctgggcccgactgcagaataaacatcaatgaatgccagtcttcaccttgtgcctttggagcgacctgtgtggatgagatcaatggctaccggtgtgtctgccctccagggcacagtggtgccaagtgccaggaagtttcagggagaccttgcatcaccatggggagtgtgataccagatggggccaaatgggatgatgactgtaatacctgccagtgcctgaatggacggatcgcctgctcaaaggtctggtgtggccctcgaccttgcctgctccacaaagggcacagcgagtgccccagcgggcagagctgcatccccatcctggacgaccagtgcttcgtccacccctgcactggtgtgggcgagtgtcggtcttccagtctccagccggtgaagacaaagtgcacctctgactcctattaccaggataactgtgcgaacatcacatttacctttaacaaggagatgatgtcaccaggtcttactacggagcacatttgcagtgaattgaggaatttgaatattttgaagaatgtttccgctgaatattcaatctacatcgcttgcgagccttccccttcagcgaacaatgaaatacatgtggccatttctgctgaagatatacgggatgatgggaacccgatcaaggaaatcactgacaaaataatcgatcttgttagtaaacgtgatggaaacagctcgctgattgctgccgttgcagaagtaagagttcagaggcggcctctgaagaacagaacagatttccttgttcccttgctgagctctgtcttaactgtggcttggatctgttgcttggtgacggccttctactggtgcctgcggaagcggcggaagccgggcagccacacacactcagcctctgaggacaacaccaccaacaacgtgcgggagcagctgaaccagatcaaaaaccccattgagaaacatggggccaacacggtccccatcaaggattacgagaacaagaactccaaaatgtctaaaataaggacacacaattctgaagtagaagaggacgacatggacaaacaccagcagaaagcccggtttgccaagcagccggcgtatacgctggtagacagagaagagaagccccccaacggcacgccgacaaaacacccaaactggacaaacaaacaggacaacagagacttggaaagtgcccagagcttaaaccgaatggagtacatcgtatagcagaccgcgggcactgccgccgctaggtagagtctgagggcttgtagttctttaaactgtcgtgtcatactcgagtctgaggccgttgctgacttagaatccctgtgttaatttaagttttgacaagctggcttacactggcaatggtagtttctgtggttggctgggaaatcgagtgccgcatctcacagctatgcaaaaagctagtcaacagtaccctggttgtgtgtccccttgcagccgacacggtctcggatcaggctcccaggagcctgcccagccccctggtctttgagctcccacttctgccagatgtcctaatggtgatgcagtcttagatcatagttttatttatatttattgactcttgagttgtttttgtatattggttttatgatgacgtacaagtagttctgtatttgaaagtgcctttgcagctcagaaccacagcaacgatcacaaatgactttattatttatttttttaattgtatttttgttgttgggggaggggagactttgatgtcagcagttgctggtaaaatgaagaatttaaagaaaaaaatgtcaaaagtagaactttgtatagttatgtaaataattcttttttattaatcactgtgtatatttgatttattaacttaataatcaagagccttaaaacatcattcctttttatttatatgtatgtgtttagaattgaaggtttttgatagcattgtaagcgtatggctttatttttttgaactcttctcattacttgttgcctataagccaaaattaaggtgtttgaaaatagtttattttaaaacaataggatgggcttctgtgcccagaatactgatggaattttttttgtacgacgtcagatgtttaaaacaccttctatagcatcacttaaaacacgttttaaggactgactgaggcagtttgaggattagtttagaacaggtttttttgtttgtttgttttttgtttttctgctttagacttgaaaagagacaggcaggtgatctgctgcagagcagtaagggaacaagttgagctatgacttaacatagccaaaatgtgagtggttgaatatgattaaaaatatcaaattaattgtgtgaacttggaagcacaccaatctgactttgtaaattctgatttcttttcaccattcgtacataatactgaaccacttgtagatttgattttttttttaatctactgcatttagggagtattctaataagctagttgaatacttgaaccataaaatgtccagtaagatcactgtttagatttgccatagagtacactgcctgccttaagtgaggaaatcaaagtgctattacgaagttcaagatcaaaaaggcttataaaacagagtaatcttgttggttcaccattgagaccgtgaagatactttgtattgtcctattagtgttatatgaacatacaaatgcatctttgatgtgttgttcttggcaataaattttgaaaagtaatatttattaaatttttttgtatgaaaacatggaacagtgtggctcttctgagcttacgtagttctaccggctttgccgtgtgcttctgccaccctgctgagtctgttctggtaatcggggtataataggctctgcctgacagagggatggaggaagaactgaaaggcttttcaaccacaaaactcatctggagttctcaaagacctggggctgctgtgaagctggaactgcgggagccccatctaggggagccttgattcccttgttattcaacagcaagtgtgaatactgcttgaataaacaccactggattaatggaaaaaaaaaaaaaaaa

SEQ ID NO: 23 - DNA, 523 bp, Homo sapiens
gcagatcgcttgcagcttgctagctgtgtgggctgggaggtctggtagggctgagcttgcaagaggatcaacatgcctttggctagagatttactacatccgtccttggaagaggaaaagaaaaaacataaaaagaaacgcctagtacaaagtccaaattcttactttatggatgtaaaatgtccaggttgctacaagatcaccacggttttcagccatgctcagacagtggttctttgtgtaggttgttcaacagtgttgtgccagcctacaggaggaaaggccagactcacagaagggtgttcatttagaagaaagcaacactaatgattcaaacagcttcctgaattttaattttgtgttgtctcacagaaagccttatcataaattccataattctaattaatttaccaagataatgtaattacatttggttttgtaaggtatacagcagtaatctcctattttggtgtcagtttttcaataaagttttgattatgggcaaaaaaaaaaaaaaaaaaaa

SEQ ID NO: 24 - DNA, 3960 bp, Homo sapiens
gttctgaatgatgactgacgcgggtttgggtgatacccctcacagcccctgtcattccggagtcataaggcacccgcgcgtctagccccagcgccagggcacgcgagcggcgctggagggaggaaagcttccgcctgcgggccggacaaaagtcccgcctgcccacggctttttgcccgccgctcgtgaccgagacgcctcgccgcggccagctcgctgctctcgctggcggatggtgtgtggccgccgcaggacgcccgccgtgcccgggccatgaagtagcggctgctggcggcgccgctgcccaaccgccagccccagccccgcgctgcgctgcccggtcctctcccggcggggtcgtatcggcgtggacatggctggccgcgtccctagcctgctagttctccttgtttttccaagcagctgtttggctttccgaagcccactttctgtctttaagaggtttaaagaaactaccagaccattttccaatgaatgtcttggtaccaccagacccgtagttcctattgattcatcagattttgcattggatattcgcatgcctggggttacacctaaacagtccgatacatacttctgcatgtctatgcgaataccagtggatgaggaagccttcgtgattgacttcaagcctcgagccagcatggatactgtccatcacatgttactttttggatgcaatatgccttcatccactggaagttactggttttgtgatgaaggaacctgtacagataaagccaatattctgtatgcctgggcgagaaatgctccccctacccggctccccaaaggtgttggattcagagttggaggagagactggaagtaaatactttgtactacaggtacactatggggatattagtgcttttagagataataacaaggactgttctggtgtgtccttacacctcacacgtctgccacagcctttaattgctggcatgtaccttatgatgtctgttgacactgttatcccagcaggagaaaaagtggtgaattctgacatttcatgccattataaaaattatccaatgcatgtctttgcctatagagttcacactcaccatttaggtaaggtagtaagtggatacagagtaagaaatggacagtggacactgattggacggcagagccctcagctgccacaggctttctaccctgtggggcatccagttgatgtaagttttggtgacctactggctgcaagatgtgtattcactggtgaaggaaggacagaagccacacacattggtggcacgtctagtgatgaaatgtgcaacttatacattatgtattacatggaagccaagcatgcagtttctttcatgacctgtacccagaatgtagctccagatatgttcagaaccataccaccagaggccaacattccaattcccgtgaagtctgatatggttatgatgcatgaacatcataaagaaacagaatataaagataagattcctttactacagcagccaaaacgagaagaagaagaagtgttagaccagggtgatttctattcactactttccaagctgctaggagaaagggaagatgttgttcatgtgcacaaatataatcctacagaaaaggcagaatcagagtcagacctggtagctgagattgcaaatgtagtccaaaaaaaggatcttggtcgatctgatgccagagagggtgcagaacatgagaggggtaatgctattcttgtcagagacagaattcacaaattccacagactagtatctaccttgaggccaccagagagcagagttttctcattacagcagcccccacctggtgaaggcacctgggaaccagaacacacaggagatttccacatggaagaggcactggattggcctggagtatacttgttaccaggccaggtttctggggtggctctagaccctaagaataacctggtgattttccacagaggtgaccatgtctgggatggaaactcgtttgacagcaagtttgtttaccagcaaataggactcggaccaattgaagaagacactattcttgtcatagatccaaataatgctgcagtactccagtccagtggaaaaaatctgttttacttgccacatggcttgagtatagataaagatgggaattattgggtcacagacgtggctctccatcaggtgttcaaactggatccaaacaataaagaaggccctgtattaatcctgggaaggagcatgcaaccaggcagtgaccagaatcacttctgtcaacccactgatgtggctgtggatccaggcactggagccatttatgtatcagatggttactgcaacagcaggattgtgcagttttcaccaagtggaaagttcatcacacagtggggagaagagtcttcagggagcagtcctctgccaggccagttcactgttcctcacagcttggctcttgtgcctcttttgggccaattatgtgtggcagaccgggaaaatggtcggatccagtgttttaaaactgacaccaaagaatttgtgagagagattaagcattcatcatttggaagaaatgtatttgcaatttcatatataccaggcttgctctttgcagtgaatgggaagcctcattttggggaccaagaacctgtacaaggatttgtgatgaacttttccaatggggaaattatagacatcttcaagccagtgcgcaagcactttgatatgcctcatgatattgttgcatctgaagatgggactgtgtacattggagatgctcataccaacaccgtgtggaagttcaccttgactgagaaattggaacatcgatcagttaaaaaggctggcattgaggtccaggaaatcaaagaagccgaggcagttgttgaaaccaaaatggagaacaaacccacctcctcagaattgcagaagatgcaagagaaacagaaactgatcaaagagccaggctcgggagtgcctgttgttctcattacaacccttctggttattccggtggttgtcctgctggccattgccatatttattcggtggaaaaaatcaagggcctttggagcagattctgaacacaaactcgagacgagttcaggaagagtactgggaagatttagaggaaagggaagtggaggcttaaaccttggtaatttctttgcaagccgtaagggctacagtcgaaaagggtttgaccggcttagcactgagggcagtgaccaagagaaagaggatgatggaagtgaatcagaagaggagtattcagcacctctgcctgcgctcgcaccttcctcctcctgaaaaccaagctttgatttagattgagtaagatttacccagaatgtcagattcctttccctttagcacgtttaaagttctgtgtatttaattgtaaactgtactagtctgtgtgggactgtacacactttatttacttcgttttggttaagttggcttctgtttctagttgaggagtttcctaaaagttcataacagtgccattgtctttatatgaacatagactagagaaaccgtcctctttttccatcataattctaatctaacaatggaagatttgcccatttacacttttgagactttttggtggatgtaaataaccccattctttgcttgaacacagtattttcccaatagcactttcattgccagtgtctttctttggtgcctttcctgttcagcattcttagcctgtggcagtaaagagaaactttgtgctacatgacgacaaagctgctaaatctcctatttttttaaaatcactaacattatattgcaatgaaggaaataaaaaagtctctatttaaattcttttttaaattttcttcagttggtgtgtttttgggatgtcttatttttagatggttacactgttagaacactattttcagaatctgaatgtaatttgtgtaataaagtgttttcagagcaaaaaaaaaaaaaaa

SEQ ID NO: 25 - DNA, 4157 bp, Homo sapiens
agcggggcggggcgccagcgctgccttttctcctgccgggtagtttcgctttcctgcgcagagtctgcggaggggctcggctgcaccggggggatcgcgcctggcagaccccagaccgagcagaggcgacccagcgcgctcgggagaggctgcaccgccgcgcccccgcctagcccttccggatcctgcgcgcagaaaagtttcatttgctgtatgccatcctcgagagctgtctaggttaacgttcgcactctgtgtatataacctcgacagtcttggcacctaacgtgctgtgcgtagctgctcctttggttgaatccccaggcccttgttggggcacaaggtggcaggatgtctcagtggtacgaacttcagcagcttgactcaaaattcctggagcaggttcaccagctttatgatgacagttttcccatggaaatcagacagtacctggcacagtggttagaaaagcaagactgggagcacgctgccaatgatgtttcatttgccaccatccgttttcatgacctcctgtcacagctggatgatcaatatagtcgcttttctttggagaataacttcttgctacagcataacataaggaaaagcaagcgtaatcttcaggataattttcaggaagacccaatccagatgtctatgatcatttacagctgtctgaaggaagaaaggaaaattctggaaaacgcccagagatttaatcaggctcagtcggggaatattcagagcacagtgatgttagacaaacagaaagagcttgacagtaaagtcagaaatgtgaaggacaaggttatgtgtatagagcatgaaatcaagagcctggaagatttacaagatgaatatgacttcaaatgcaaaaccttgcagaacagagaacacgagaccaatggtgtggcaaagagtgatcagaaacaagaacagctgttactcaagaagatgtatttaatgcttgacaataagagaaaggaagtagttcacaaaataatagagttgctgaatgtcactgaacttacccagaatgccctgattaatgatgaactagtggagtggaagcggagacagcagagcgcctgtattggggggccgcccaatgcttgcttggatcagctgcagaactggttcactatagttgcggagagtctgcagcaagttcggcagcagcttaaaaagttggaggaattggaacagaaatacacctacgaacatgaccctatcacaaaaaacaaacaagtgttatgggaccgcaccttcagtcttttccagcagctcattcagagctcgtttgtggtggaaagacagccctgcatgccaacgcaccctcagaggccgctggtcttgaagacaggggtccagttcactgtgaagttgagactgttggtgaaattgcaagagctgaattataatttgaaagtcaaagtcttatttgataaagatgtgaatgagagaaatacagtaaaaggatttaggaagttcaacattttgggcacgcacacaaaagtgatgaacatggaggagtccaccaatggcagtctggcggctgaatttcggcacctgcaattgaaagaacagaaaaatgctggcaccagaacgaatgagggtcctctcatcgttactgaagagcttcactcccttagttttgaaacccaattgtgccagcctggtttggtaattgacctcgagacgacctctctgcccgttgtggtgatctccaacgtcagccagctcccgagcggttgggcctccatcctttggtacaacatgctggtggcggaacccaggaatctgtccttcttcctgactccaccatgtgcacgatgggctcagctttcagaagtgctgagttggcagttttcttctgtcaccaaaagaggtctcaatgtggaccagctgaacatgttgggagagaagcttcttggtcctaacgccagccccgatggtctcattccgtggacgaggttttgtaaggaaaatataaatgataaaaattttcccttctggctttggattgaaagcatcctagaactcattaaaaaacacctgctccctctctggaatgatgggtgcatcatgggcttcatcagcaaggagcgagagcgtgccctgttgaaggaccagcagccggggaccttcctgctgcggttcagtgagagctcccgggaaggggccatcacattcacatgggtggagcggtcccagaacggaggcgaacctgacttccatgcggttgaaccctacacgaagaaagaactttctgctgttactttccctgacatcattcgcaattacaaagtcatggctgctgagaatattcctgagaatcccctgaagtatctgtatccaaatattgacaaagaccatgcctttggaaagtattactccaggccaaaggaagcaccagagccaatggaacttgatggccctaaaggaactggatatatcaagactgagttgatttctgtgtctgaagttcacccttctagacttcagaccacagacaacctgctccccatgtctcctgaggagtttgacgaggtgtctcggatagtgggctctgtagaattcgacagtatgatgaacacagtatagagcatgaatttttttcatcttctctggcgacagttttccttctcatctgtgattccctcctgctactctgttccttcacatcctgtgtttctagggaaatgaaagaaaggccagcaaattcgctgcaacctgttgatagcaagtgaatttttctctaactcagaaacatcagttactctgaagggcatcatgcatcttactgaaggtaaaattgaaaggcattctctgaagagtgggtttcacaagtgaaaaacatccagatacacccaaagtatcaggacgagaatgagggtcctttgggaaaggagaagttaagcaacatctagcaaatgttatgcataaagtcagtgcccaactgttataggttgttggataaatcagtggttatttagggaactgcttgacgtaggaacggtaaatttctgtgggagaattcttacatgttttctttgctttaagtgtaactggcagttttccattggtttacctgtgaaatagttcaaagccaagtttatatacaattatatcagtcctctttcaaaggtagccatcatggatctggtagggggaaaatgtgtattttattacatctttcacattggctatttaaagacaaagacaaattctgtttcttgagaagagaatattagctttactgtttgttatggcttaatgacactagctaatatcaatagaaggatgtacatttccaaattcacaagttgtgtttgatatccaaagctgaatacattctgctttcatcttggtcacatacaattatttttacagttctcccaagggagttaggctattcacaaccactcattcaaaagttgaaattaaccatagatgtagataaactcagaaatttaattcatgtttcttaaatgggctactttgtcctttttgttattagggtggtatttagtctattagccacaaaattgggaaaggagtagaaaaagcagtaactgacaacttgaataatacaccagagataatatgagaatcagatcatttcaaaactcatttcctatgtaactgcattgagaactgcatatgtttcgctgatatatgtgtttttcacatttgcgaatggttccattctctctcctgtactttttccagacacttttttgagtggatgatgtttcgtgaagtatactgtatttttacctttttccttccttatcactgacacaaaaagtagattaagagatgggtttgacaaggttcttcccttttacatactgctgtctatgtggctgtatcttgtttttccactactgctaccacaactatattatcatgcaaatgctgtattcttctttggtggagataaagatttcttgagttttgttttaaaattaaagctaaagtatctgtattgcattaaatataatatgcacacagtgctttccgtggcactgcatacaatctgaggcctcctctctcagtttttatatagatggcgagaacctaagtttcagttgattttacaattgaaatgactaaaaaacaaagaagacaacattaaaacaatattgtttcta

SEQ ID NO: 26 - DNA, 1978 bp, Homo sapiens
gggagggtacttagggccggggctggcccaggctacggcggctgcagggctccggcaaccgctccggcaacgccaaccgctccgctgcgcgcaggctgggctgcaggctctcggctgcagcgctgggtggatctaggatccggcttccaacatgtggcagctctgggcctccctctgctgcctgctggtgttggccaatgcccggagcaggccctctttccatcccctgtcggatgagctggtcaactatgtcaacaaacggaataccacgtggcaggccgggcacaacttctacaacgtggacatgagctacttgaagaggctatgtggtaccttcctgggtgggcccaagccaccccagagagttatgtttaccgaggacctgaagctgcctgcaagcttcgatgcacgggaacaatggccacagtgtcccaccatcaaagagatcagagaccagggctcctgtggctcctgctgggccttcggggctgtggaagccatctctgaccggatctgcatccacaccaatgcgcacgtcagcgtggaggtgtcggcggaggacctgctcacatgctgtggcagcatgtgtggggacggctgtaatggtggctatcctgctgaagcttggaacttctggacaagaaaaggcctggtttctggtggcctctatgaatcccatgtagggtgcagaccgtactccatccctccctgtgagcaccacgtcaacggctcccggcccccatgcacgggggagggagatacccccaagtgtagcaagatctgtgagcctggctacagcccgacctacaaacaggacaagcactacggatacaattcctacagcgtctccaatagcgagaaggacatcatggccgagatctacaaaaacggccccgtggagggagctttctctgtgtattcggacttcctgctctacaagtcaggagtgtaccaacacgtcaccggagagatgatgggtggccatgccatccgcatcctgggctggggagtggagaatggcacaccctactggctggttgccaactcctggaacactgactggggtgacaatggcttctttaaaatactcagaggacaggatcactgtggaatcgaatcagaagtggtggctggaattccacgcaccgatcagtactgggaaaagatctaatctgccgtgggcctgtcgtgccagtcctgggggcgagatcggggtagaaatgcattttattctttaagttcacgtaagatacaagtttcagacagggtctgaaggactggattggccaaacatcagacctgtcttccaaggagaccaagtcctggctacatcccagcctgtggttacagtgcagacaggccatgtgagccaccgctgccagcacagagcgtccttccccctgtagactagtgccgtagggagtacctgctgccccagctgactgtggccccctccgtgatccatccatctccagggagcaagacagagacgcaggaatggaaagcggagttcctaacaggatgaaagttcccccatcagttcccccagtacctccaagcaagtagctttccacatttgtcacagaaatcagaggagagatggtgttgggagccctttggagaacgccagtctcccaggccccctgcatctatcgagtttgcaatgtcacaacctctctgatcttgtgctcagcatgattctttaatagaagttttattttttcgtgcactctgctaatcatgtgggtgagccagtggaacagcgggagacctgtgctagttttacagattgcctcctaatgacgcggctcaaaaggaaaccaagtggtcaggagttgtttctgacccactgatctctactaccacaaggaaaatagtttaggagaaaccagcttttactgtttttgaaaaattacagcttcaccctgtcaagttaacaaggaatgcctgtgccaataaaagttttctccaacttgaa

SEQ ID NO: 27 - DNA, 392 bp, Homo sapiens
agtctgggacgcgccgccgccatgatcatccctgtacgctgcttcacttgtggcaagatcgtcggcaacaagtgggaggcttacctggggctgctgcaggccgagtacaccgagggggacgcgctggatgccctgggcctgaagcgctactgctgccgccggatgctgctggcccacgtggacctgatcgagaagctgctcaattatgcacccctggagaagtgaccacgctgaaacccacccacccgctgtgctgaccatgggccctgagcgtcctaccccgaattcacgaggctgaggcatccgggagctggcgtaatgcctggccgcagtgtgtgtgtatcccataccccactctggaaggaaccatccagtaaaggtctttcagaacc

SEQ ID NO: 28 - DNA, 2256 bp, Homo sapiens
aagtggcttcagagatgcagccctcagtgcttaacgtcctagttattgtccttgaaacccgagccatctcaccgctcgcccccaaccctgggctctggctgtttaaaagctggagaggaagtgaaagcgtcaagtacatcccgttaggtgcaaagcaagtctcgttgatcgccattgctagttttgcacacgtttgcgaatcagagctgcccggggtacaccgaccgcgcagggaaacatcgagagtgtaaataaatacatcgcctcttgttcggatttttgctactaccgaaaatatgtaaattgtgaactctgttggctctctttggatccaggttgatagaagtccagatcctgaggaaatctccagctaaatgctcaaaatataaaaactgagctgagatttgcgaagagcagcagcatggatggattttatgaccagcaagtgccttacatggtcaccaatagtcagcgtgggagaaattgtaacgagaaaccaacaaatgtcaggaaaagaaaattcattaacagagatctggctcatgattcagaagaactctttcaagatctaagtcaattacaggaaacatggcttgcagaagctcaggtacctgacaatgatgagcagtttgtaccagactatcaggctgaaagtttggcttttcatggcctgccactgaaaatcaagaaagaaccccacagtccatgttcagaaatcagctctgcctgcagtcaagaacagccctttaaattcagctatggagaaaagtgcctgtacaatgtcagtgcctatgatcagaagccacaagtgggaatgaggccctccaacccccccacaccatccagcacgccagtgtccccactgcatcatgcatctccaaactcaactcatacaccgaaacctgaccgggccttcccagctcacctccctccatcgcagtccataccagatagcagctaccccatggaccacagatttcgccgccagctttctgaaccctgtaactcctttcctcctttgccgacgatgccaagggaaggacgtcctatgtaccaacgccagatgtctgagccaaacatccccttcccaccacaaggctttaagcaggagtaccacgacccagtgtatgaacacaacaccatggttggcagtgcggccagccaaagctttccccctcctctgatgattaaacaggaacccagagattttgcatatgactcagaagtgcctagctgccactccatttatatgaggcaagaaggcttcctggctcatcccagcagaacagaaggctgtatgtttgaaaagggccccaggcagttttatgatgacacctgtgttgtcccagaaaaattcgatggagacatcaaacaagagccaggaatgtatcgggaaggacccacataccaacggcgaggatcacttcagctctggcagtttttggtagctcttctggatgacccttcaaattctcattttattgcctggactggtcgaggcatggaatttaaactgattgagcctgaagaggtggcccgacgttggggcattcagaaaaacaggccagctatgaactatgataaacttagccgttcactccgctattactatgagaaaggaattatgcaaaaggtggctggagagagatatgtctacaagtttgtgtgtgatccagaagcccttttctccatggcctttccagataatcagcgtccactgctgaagacagacatggaacgtcacatcaacgaggaggacacagtgcctctttctcactttgatgagagcatggcctacatgccggaagggggctgctgcaacccccacccctacaacgaaggctacgtgtattaacacaagtgacagtcaagcagggcgtttttgcgcttttccttttttctgcaagatacagagaattgctgaatctttgttttatttctgttgtttgtattttatttttaaataataatacacaaaaaggggcttttcctgttgcattattctatggtctgccatggactgtgcactttatttgagggtgggtgggagtaatctaaacatttattctgtgtaacaggaagctaatgggtgaatgggcagagggatttggggattactttttacttaggcttgggatggggtcctacaagttttgagtatgatgaaactatatcatgtctgtttgatttcataacaacataagataatgtttattttatcggggtatctatggtacagttaatttcacgttgtgt

SEQ ID NO: 29 - DNA, 1412 bp, Homo sapiens
cggggtcgtccgcaaagcctgagtcctgtcctttctctctccccggacagcatgagcttcaccactcgctccaccttctccaccaactaccggtccctgggctctgtccaggcgcccagctacggcgcccggccggtcagcagcgcggccagcgtctatgcaggcgctgggggctctggttcccggatctccgtgtcccgctccaccagcttcaggggcggcatggggtccgggggcctggccaccgggatagccgggggtctggcaggaatgggaggcatccagaacgagaaggagaccatgcaaagcctgaacgaccgcctggcctcttacctggacagagtgaggagcctggagaccgagaaccggaggctggagagcaaaatccgggagcacttggagaagaagggaccccaggtcagagactggagccattacttcaagatcatcgaggacctgagggctcagatcttcgcaaatactgtggacaatgcccgcatcgttctgcagattgacaatgcccgtcttgctgctgatgactttagagtcaagtatgagacagagctggccatgcgccagtctgtggagaacgacatccatgggctccgcaaggtcattgatgacaccaatatcacacgactgcagctggagacagagatcgaggctctcaaggaggagctgctcttcatgaagaagaaccacgaagaggaagtaaaaggcctacaagcccagattgccagctctgggttgaccgtggaggtagatgcccccaaatctcaggacctcgccaagatcatggcagacatccgggcccaatatgacgagctggctcggaagaaccgagaggagctagacaagtactggtctcagcagattgaggagagcaccacagtggtcaccacacagtctgctgaggttggagctgctgagacgacgctcacagagctgagacgtacagtccagtccttggagatcgacctggactccatgagaaatctgaaggccagcttggagaacagcctgagggaggtggaggcccgctacgccctacagatggagcagctcaacgggatcctgctgcaccttgagtcagagctggcacagacccgggcagagggacagcgccaggcccaggagtatgaggccctgctgaacatcaaggtcaagctggaggctgagatcgccacctaccgccgcctgctggaagatggcgaggactttaatcttggtgatgccttggacagcagcaactccatgcaaaccatccaaaagaccaccacccgccggatagtggatggcaaagtggtgtctgagaccaatgacaccaaagttctgaggcattaagccagcagaagcagggtaccctttggggagcaggaggccaataaaaagttcagagttcattggatgtc

SEQ ID NO: 30 - DNA, 737 bp, Homo sapiens
ttccggcgttgttgaccctatttcccgtgctgcaccgcagcccctttctcttccggttctaggcgcttcgggagccgcggcttatggtgcagacatggccaagtccaagaaccacaccacacacaaccagtcccgaaaatggcacagaaatggtatcaagaaaccccgatcacaaagatacgaatctcttaagggggtggaccccaagttcctgaggaacatgcgctttgccaagaagcacaacaaaaagggcctaaagaagatgcaggccaacaatgccaaggccatgagtgcacgtgccgaggctatcaaggccctcgtaaagcccaaggaggttaagcccaagatcccaaagggtgtcagccgcaagctcgatcgacttgcctacattgcccaccccaagcttgggaagcgtgctcgtgcccgtattgccaaggggctcaggctgtgccggccaaaggccaaggccaaggccaaggccaaggatcaaaccaaggcccaggctgcagccccagcttcagttccagctcaggctcccaaacgtacccaggcccctacaaaggcttcagagtagatatctctgccaacatgaggacagaaggactggtgcgaccccccacccccgcccctgggctaccatctgcatggggctggggtcctcctgtgctatttgtacaaataaacctgaggcaggaaaaaaaaaaaaaaaaaaaaaaaaaaaaaaaaaaaaaaaaaaa

SEQ ID NO: 31 - DNA, 4166 bp, Homo sapiens
cccacgcgtccgcgccagagcagctgcaccatcccggcgttcgcgtgtgccgccgctttcctcctccatctcttttcctccgcctccgccggcgcgatggcgaagccgctgacggacagcgagaagcggaagcagatcagcgtgcgcggcctggcggggctaggcgacgtggccgaggtgcggaagagcttcaaccggcacttgcacttcacgctggtcaaggaccgcaatgtggccacgccccgcgactacttcttcgcgctggcgcacacggtgcgcgaccacctcgtgggccgctggatccgcacgcagcagcactactacgagcgcgaccccaagcgcatttattatctttccctggaattctacatgggtcgcacgctgcagaacacgatggtgaacctgggccttcagaatgcctgcgatgaagccatctatcagttggggttagacttggaggaactcgaggagatagaagaagatgctggccttgggaatggaggcctggggaggctggcagcgtgtttccttgactcaatggctaccttgggcctggcagcatacggctatggaatccgctatgaatttgggatttttaaccagaagattgtcaatggctggcaggtagaggaggccgatgactggctgcgctacggcaacccctgggagaaagcgcggcctgagtatatgcttcccgtgcacttctacggacgcgtggagcacacccccgacggcgtgaagtggctggacacacaggtggtgctggccatgccctacgacaccccagtgcccggctacaagaacaacaccgtcaacaccatgcggctgtggtccgccaaggctcccaacgacttcaagctgcaggacttcaacgtgggagactacatcgaggcggtcctggaccggaacttggctgagaacatctccagggtcctgtatccaaatgataacttctttgaggggaaggagctgcggctgaagcaggagtacttcgtggtggccgccacgctccaggacatcatccgccgcttcaagtcgtccaagttcggctgccgggaccctgtgagaacctgtttcgagacgttcccagacaaggtggccatccagctgaacgacacccaccccgccctctccatccctgagctcatgcggatcctggtggacgtggagaaggtggactgggacaaggcctgggaaatcacgaagaagacctgtgcatacaccaaccacactgtgctgcctgaggccttggagcgctggcccgtgtccatgtttgagaagctgctgccgcggcacctggagataatctatgccatcaaccagcggcacctggaccacgtggccgcgctgtttcccggcgatgtggaccgcctgcgcaggatgtctgtgatcgaggagggggactgcaagcggatcaacatggcccacctgtgtgtgattgggtcccatgctgtcaatggtgtggcgaggatccactcggagatcgtgaaacagtcggtctttaaggatttttatgaactggagccagagaagttccagaataagaccaatggcatcaccccccgccggtggctgctgctgtgcaacccggggctggccgataccatcgtggagaaaattggggaggagttcctgactgacctgagccagctgaagaagctgctgccgctggtcagtgacgaggtgttcatcagggacgtggccaaggtcaaacaggagaacaagctcaagttctcggccttcctggagaaggagtacaaggtgaagatcaacccctcctccatgttcgatgtgcatgtgaagaggatccacgagtacaagcggcagctgctcaactgcctgcacgtcgtcaccctgtacaatcgaatcaagagagacccggccaaggcttttgtgcccaggactgttatgattgggggcaaggcagcgcccggttaccacatggccaagctgatcatcaagttggtcacctccatcggcgacgtcgtcaatcatgacccagttgtgggtgacaggttgaaagtgatcttcctggagaactaccgtgtgtccttggctgagaaagtgatcccggccgctgatctgtcgcagcagatctccactgcaggcaccgaggcctcaggcacaggcaacatgaagttcatgctcaacggggccctcaccatcggcaccatggacggcgccaacgtggagatggccgaggaggccggggccgagaacctcttcatcttcggcctgcgggtggaggatgtcgaggccttggaccggaaagggtacaatgccagggagtactacgaccacctgcccgagctgaagcaggccgtggaccagatcagcagtggctttttttctcccaaggagccagactgcttcaaggacatcgtgaacatgctgatgcaccatgacaggttcaaggtgtttgcagactatgaagcctacatgcagtgccaggcacaggtggaccagctgtaccggaaccccaaggagtggaccaagaaggtcatcaggaacatcgcctgctcgggcaagttctccagtgaccggaccatcacggagtatgcacgggagatctggggtgtggagccctccgacctgcagatcccgccccccaacatcccccgggactaggcacaccctgccttggcgggaccagcgggcatttgttttcttgctgactttgcacctccttttttccccaaacactttgccagccactggtggtccctgcttttctgagtaccatgtttccaggaggggccatgggggtcagggtggttttgagagagcagggtaaggaaggaatgtgctagaagtgctcctagtttcttgtaaaggaagccagagttgacagtacaaagggtcgtggccagccctgcagcttcagcacctgccccacccagagtgggagtcaggtggagccacctgctgggctcccccagaactttgcacacatcttgctatgtattagccgatgtctttagtgttgagcctctggattctggggtctgggccagtggccatagtgaagcctgggaatgagtgttactgcagcatctgggctgccagccacagggaagggccaagccccatgtagccccagtcatcctgcccagccctgcctcctggccatgccgggaggggtcggatcctctaggcatcgccttcacagccccctgccccctgccctctgtcctggctctgcacctggtatatgggtcatggacccagatggggctttccctttgtagccatccaatgggcattgtgtgggtgcttggaacccgggatgactgagggggacactggagtgggtgcttgtgtctgctgtctcagaggccttggtcaggatgaagttggctgacacagcttagcttggttttgcttattcaaaagagaaaataactacacatggaaatgaaactagctgaagccttttcttgttttagcaactgaaaattgtacttggtcacttttgtgcttgaggaggcccattttctgcctggcagggggcaggtctgtgccctcccgctgactcctgctgtgtcctgaggtgcatttcctgttgtacacacaagggccaggctccattctccctccctttccaccagtgccacagcctcgtctggaaaaaggaccaggggtcccggaggaacccatttgtgctctgcttggacagcaggcctggcactgggaggtgggggtgagcccctcacagccttgcccctccccaaggctggcaacctgcctcccattgcccaagagagagggcagggaacaggctactgtccttccctgtggaattgccgagaaatctagcaccttgcatgctggatctgggctgcggggaggctctttttctccctggcctccagtgcccaccaggaggatctgcgcacggtgcacagcccaccagagcactacagccttttattgagtggggcaagtgctgggctgtggtcgtgccctgacagcatcttccccaggcagcggctctgtggaggaggccatactcccctagttggccactggggccaccaccctgaccaccactgtgcccctcattgttactgccttgtgagataaaaactgattaaacctttgtggctgtggttggcaaaaaaaaaaaaaaaaaaaaaaaaaaaaaaaaaaaaaaaaaaaaaaaaaaa

SEQ ID NO: 32 - DNA, 2539 bp, Homo sapiens
cgggacgacgccccctcctgcggcgtggactccgtcagtggcccaccaagaaggaggaggaatatggaatccaagggggccagttcctgccgtctgctcttctgcctcttgatctccgccaccgtcttcaggccaggccttggatggtatactgtaaattcagcatatggagataccattatcataccttgccgacttgacgtacctcagaatctcatgtttggcaaatggaaatatgaaaagcccgatggctccccagtatttattgccttcagatcctctacaaagaaaagtgtgcagtacgacgatgtaccagaatacaaagacagattgaacctctcagaaaactacactttgtctatcagtaatgcaaggatcagtgatgaaaagagatttgtgtgcatgctagtaactgaggacaacgtgtttgaggcacctacaatagtcaaggtgttcaagcaaccatctaaacctgaaattgtaagcaaagcactgtttctcgaaacagagcagctaaaaaagttgggtgactgcatttcagaagacagttatccagatggcaatatcacatggtacaggaatggaaaagtgctacatccccttgaaggagcggtggtcataatttttaaaaaggaaatggacccagtgactcagctctataccatgacttccaccctggagtacaagacaaccaaggctgacatacaaatgccattcacctgctcggtgacatattatggaccatctggccagaaaacaattcattctgaacaggcagtatttgatatttactatcctacagagcaggtgacaatacaagtgctgccaccaaaaaatgccatcaaagaaggggataacatcactcttaaatgcttagggaatggcaaccctcccccagaggaatttttgttttacttaccaggacagcccgaaggaataagaagctcaaatacttacacactgatggatgtgaggcgcaatgcaacaggagactacaagtgttccctgatagacaaaaaaagcatgattgcttcaacagccatcacagttcactatttggatttgtccttaaacccaagtggagaagtgactagacagattggtgatgccctacccgtgtcatgcacaatatctgctagcaggaatgcaactgtggtatggatgaaagataacatcaggcttcgatctagcccgtcattttctagtcttcattatcaggatgctggaaactatgtctgcgaaactgctctgcaggaggttgaaggactaaagaaaagagagtcattgactctcattgtagaaggcaaacctcaaataaaaatgacaaagaaaactgatcccagtggactatctaaaacaataatctgccatgtggaaggttttccaaagccagccattcagtggacaattactggcagtggaagcgtcataaaccaaacagaggaatctccttatattaatggcaggtattatagtaaaattatcatttcccctgaagagaatgttacattaacttgcacagcagaaaaccaactggagagaacagtaaactccttgaatgtctctgctataagtattccagaacacgatgaggcagacgagataagtgatgaaaacagagaaaaggtgaatgaccaggcaaaactaattgtgggaatcgttgttggtctcctccttgctgcccttgttgctggtgtcgtctactggctgtacatgaagaagtcaaagactgcatcaaaacatgtaaacaaggacctcggtaatatggaagaaaacaaaaagttagaagaaaacaatcacaaaactgaagcctaagagagaaactgtcctagttgtccagagataaaaatcatatagaccaattgaagcatgaacgtggattgtatttaagacataaacaaagacattgacagcaattcatggttcaagtattaagcagttcattctaccaagctgtcacaggttttcagagaattatctcaagtaaaacaaatgaaatttaattacaaacaataagaacaagttttggcagccatgataataggtcatatgttgtgtttggttcaattttttttccgtaaatgtctgcactgaggatttctttttggtttgccttttatgtaaattttttacgtagctatttttatacactgtaagctttgttctgggagttgctgttaatctgatgtataatgtaatgtttttatttcaattgtttatatggataatctgagcaggtacatttctgattctgattgctatcagcaatgccccaaactttctcataagcacctaaaacccaaaggtggcagcttgtgaagattggggacactcatattgccctaattaaaaactgtgatttttatcacaagggaggggaggccgagagtcagactgatagacaccataggagccgactctttgatatgccaccagcgaactctcagaaataaatcacagatgcatatagacacacatacataatggtactcccaaactgacaattttacctattctgaaaaagacataaaacagaatt

SEQ ID NO: 33 - DNA, 2312 bp, Homo sapiens
tccagtgacggagccgcccggccgacagccccgagacgacagcccggcgcgtcccggtccccacctccgaccaccgccagcgctccaggccccgcgctccccgctcgccgccaccgcgccctccgctccgcccgcagtgccaaccatgaccgccgccagtatgggccccgtccgcgtcgccttcgtggtcctcctcgccctctgcagccggccggccgtcggccagaactgcagcgggccgtgccggtgcccggacgagccggcgccgcgctgcccggcgggcgtgagcctcgtgctggacggctgcggctgctgccgcgtctgcgccaagcagctgggcgagctgtgcaccgagcgcgacccctgcgacccgcacaagggcctcttctgtgacttcggctccccggccaaccgcaagatcggcgtgtgcaccgccaaagatggtgctccctgcatcttcggtggtacggtgtaccgcagcggagagtccttccagagcagctgcaagtaccagtgcacgtgcctggacggggcggtgggctgcatgcccctgtgcagcatggacgttcgtctgcccagccctgactgccccttcccgaggagggtcaagctgcccgggaaatgctgcgaggagtgggtgtgtgacgagcccaaggaccaaaccgtggttgggcctgccctcgcggcttaccgactggaagacacgtttggcccagacccaactatgattagagccaactgcctggtccagaccacagagtggagcgcctgttccaagacctgtgggatgggcatctccacccgggttaccaatgacaacgcctcctgcaggctagagaagcagagccgcctgtgcatggtcaggccttgcgaagctgacctggaagagaacattaagaagggcaaaaagtgcatccgtactcccaaaatctccaagcctatcaagtttgagctttctggctgcaccagcatgaagacataccgagctaaattctgtggagtatgtaccgacggccgatgctgcaccccccacagaaccaccaccctgccggtggagttcaagtgccctgacggcgaggtcatgaagaagaacatgatgttcatcaagacctgtgcctgccattacaactgtcccggagacaatgacatctttgaatcgctgtactacaggaagatgtacggagacatggcatgaagccagagagtgagagacattaactcattagactggaacttgaactgattcacatctcatttttccgtaaaaatgatttcagtagcacaagttatttaaatctgtttttctaactgggggaaaagattcccacccaattcaaaacattgtgccatgtcaaacaaatagtctatcttccccagacactggtttgaagaatgttaagacttgacagtggaactacattagtacacagcaccagaatgtatattaaggtgtggctttaggagcagtgggagggtaccagcagaaaggttagtatcatcagatagctcttatacgagtaatatgcctgctatttgaagtgtaattgagaaggaaaattttagcgtgctcactgacctgcctgtagccccagtgacagctaggatgtgcattctccagccatcaagagactgagtcaagttgttccttaagtcagaacagcagactcagctctgacattctgattcgaatgacactgttcaggaatcggaatcctgtcgattagactggacagcttgtggcaagtgaatttcctgtaacaagccagattttttaaaatttatattgtaaatattgtgtgtgtgtgtgtgtgtgtatatatatatatatatgtacagttatctaagttaatttaaagttgtttgtgcctttttatttttgtttttaatgctttgatatttcaatgttagcctcaatttctgaacaccataggtagaatgtaaagcttgtctgatcgttcaaagcatgaaatggatacttatatggaaattctctcagatagaatgacagtccgtcaaaacagattgtttgcaaaggggaggcatcagtgtccttggcaggctgatttctaggtaggaaatgtggtagctcacgctcacttttaatgaacaaatggcctttattaaaaactgagtgactctatatagctgatcagttttttcacctggaagcatttgtttctactttgatatgactgtttttcggacagtttatttgttgagagtgtgaccaaaagttacatgtttgcacctttctagttgaaaataaagtatattttttctaaaaaaaaaaaaaaacgacagcaacggaattc

SEQ ID NO: 34 - DNA, 1110 bp, Homo sapiens
cctgggcggctccgctagctgtttttcgtcttccctaggctatttctgccgggcgctccgcgaagatgcagctcaagccgatggagatcaaccccgagatgctgaacaaagtgctgtcccggctgggggtcgccggccagtggcgcttcgtggacgtgctggggctggaagaggagtctctgggctcggtgccagcgcctgcctgcgcgctgctgctgctgtttcccctcacggcccagcatgagaacttcaggaaaaagcagattgaagagctgaagggacaagaagttagtcctaaagtgtacttcatgaagcagaccattgggaattcctgtggcacaatcggacttattcacgcagtggccaataatcaagacaaactgggatttgaggatggatcagttctgaaacagtttctttctgaaacagagaaaatgtcccctgaagacagagcaaaatgctttgaaaagaatgaggccatacaggcagcccatgatgccgtggcacaggaaggccaatgtcgggtagatgacaaggtgaatttccattttattctgtttaacaacgtggatggccacctctatgaacttgatggacgaatgccttttccggtgaaccatggcgccagttcagaggacaccctgctgaaggacgctgccaaggtctgcagagaattcaccgagcgtgagcaaggagaagtccgcttctctgccgtggctctctgcaaggcagcctaatgctctgtgggagggactttgctgatttcccctcttcccttcaacatgaaaatatatacccccccatgcagtctaaaatgcttcagtacttgtgaaacacagctgttcttctgttctgcagacacgccttcccctcagccacacccaggcacttaagcacaagcagagtgcacagctgtccactgggccattgtggtgtgagcttcagatggtgaagcattctccccagtgtatgtcttgtatccgatatctaacgctttaaatggctactttggtttctgtctgtaagttaagaccttggatgtggtttaattgtttgtcctcaaaaggaataaaacttttctgctgataagataaaaaaaaaaaaaaaaaa

SEQ ID NO: 35 - DNA, 14406 bp, Homo sapiens
atgcccccagggatggtcagtagcctccctctgagccgcaggctacggcatgtgtacctgctgctctttgtgtgtctgtccctgcactgggcctggttccggggcctgggtgtctcagcatcttggagggcagggctgaggggggcagggcagtcccttgggcgctgggtctatgctgctgcagctgaccacacccagggcattggcagccactggccagggggttgggctggccggcactggtgcaggctggaccccactccttggggaaaacaggtcaatgctaatggtgccgacaatgctgcagcctgcttgtctccactgacagccactctctctgcagtgtccggccgtcagctgcagcccggggagccaggtgcagaaacggaagatgaccactctgtgactgaagggcctgcggatgagggcattcgaccacggccgcaggggtcttcacctgtctacgaatacacgactgaggctgccgactttggactccaggaagacgcccccggcaggcaaggttctgctgggagacggagatcctggtggaagcgagattcaggggactcacggacatttttcaggatgagtcgtccagaggctgtccaggaggcaacagaggtgacgctgaagacagaggtggaggcaggagccagtggctacagtgtcacaggtggtggggaccaggggatcttcgtcaagcaagtgctgaaggactcctcagccgccaagctttttaacttgagagaaggggatcagctgctcagtacaaccgtgttctttgaaaacataaaatatgaagatgctctcaaaatccttcaatattcagagccgtacaaggttcagttcaaaatcagacggcagctccctgccccacaggatgaagagtgggcttccagcgatgcccagcacggcccacagggcaaggagaaggaggacacggatgttgctgatgggtgcagagagacccccacgaaaactctggaaggagatggggaccaagagagactcatctccaaaccaagggtggggagaggcaggcagagccagagggagaggctctcttggccaaaatttcaatccataaagagcaagcgggggccgggaccccagaggtcacacagctcgtcagaggcctacgaacctagggacgcacatgacgtgtcccctacaagcacagacacagaggcccagctcacggtggagcgccaagagcagaaggcagggccgggcagccagaggaggcggaagttcctcaacctcagattcaggacaggctcgggacagggcccttcatcgacaggacagccaggcagggggttccagagtggggtgggccgtgctggggtcctggaagagttggggccctggggtgatagcctcgaggagactggggctgccacaggcagcaggagagaggagagggcagaacaggatcgagaagtgatgcctgctcagagcatgccattgcccacagagctcggtgaccctagactttgcgagggaacccctcaggaagggggactcagggcagccaggctccatggaaagaccctggaggggcaggcacaggagacagcagtggcccagaggaagcccagggcccagccaactcctggaatgagccgggagggtgaaggcgagggactgcagagcctggaaatcgggatcgccagactgtccttgagagacacaaccgaaggaggcacacagattggcccaccagaaattagggtgcgagtacacgatttaaagacaccaaaatttgcattttccacagaaaaagagccagaaagagaaaggcgccttagtaccccacagcgagggaagagacaggatgcgtcctcaaaagcgggtactggcctgaagggtgaggaggtggaaggagccgggtggatgccgggcagggaaccaaccacacatgcagaagcacagggggatgaaggagatggagaggaaggactacagaggacaaggatcactgaggaacaggacaagggcagggaagacacagaaggacagataagaatgcccaagttcaagataccctccttaggatggtcgccaagcaagcacacaaagacaggcagagaaaaagccacagaagacacagagcagggaagggaaggagaggccacagcaacagctgatagaagagaacagagacgcacagaggaaggattaaaagacaaagaagacagtgactcaatgacaaacacaacaaaaatacaactaatacacgatgaaaaacgcttaaaaaaggaacaaattctgacagaaaaggaagtggccaccaaagacagcaagttcaaaatgcccaagttcaagatgccattgttcggggcgtcagccccaggcaagtccatggaggcctcggtggatgtgtctgcgccgaaggtggaggccgacgtgagcctcctctccatgcagggggacctcaagaccactgacctcagcgtccagaccccttccgctgacctggaggtccaggatggccaagtggatgtgaaacttccggagggccccctgcccgagggagccagcctcaaagggcacctgcccaaggtgcagaggcccagtttgaagatgcccaaagtggacctcaagggccccaagctggacctgaaaggccccaaggcggaagtgacagcccccgatgtgaagatgtctctgtccagcatggaggtggacgtccaggccccgagagcaaagctggatggtgcgcggctggagggggacctgtccctggccgacaaggaggtgactgccaaagacagcaagttcaaaatgcccaagttcaagatgccatcattcggggtgtcggccccaggcaagtccatggaggactcggtggatgtgtctgcgccgaaggtggaggccgacgtgagcctctcctccatgcagggggacctcaaggccactgacctcagcattcagcccccttccgctgacctggaggtccaggctggccaagtggatgtgaaacttccggagggccctgtgcccgagggagccggccccaaagtgcacctgcccaaagtggagatgcccagtttcaagatgcccaaagtggacctcaagggcccccagatagatgttaagggccccaagctggacctgaaaggccccaaggcggaagtgacagcccccgatggcgaggtgtctctgcccagcatggaggtggatgtccaggcccagaaggccaagctggatggtgcgtggctggagggggacctgtccctggccgacaaggacgtgactgccaaagacagcaagttcaaaatgcccaagttcaagatgccgtcgttcggggtatcggccccagggaagtccatcaaggccttggtggatgtgtctgcacccaaggtggaggccgacctgagtctcccctccatgcagggggacctgaagaccactgacctcagcattcagcctgcttctactgacctgaaggtccaggctgaccaggtggatgtgaagctcccggagggccacctgcccgagggagctggccttaaagggcacttgcccaaggtggagatgcccagtttcaagatgcccaaagtggccctcaagggcccccaggtggacgtcaagggccccaagctggacctgaaaagccccaaggcggaagtcacagcccctgatgtggaggtgtctctgcccagcgtggaggtggacgtcgaggccccgggagccaagctggacagtgcgcggctggagggggaactgtccctggccgacaaggatgtgactgccaaagacagcaggttcaaaatgcccaagttcaagatgccatcgttcggggcgtcagccccaggcaagtccatcgaggcctcggtggatgtgtctgcacccaaagtggaggccgacgtggacgtgaagctcctggagggccacgtgcctgagggagccggcttcaaagggcacctgcccaaggtgcagatgcctagtttgaagatgcccaaagtggacctcaagggcccccaggtggaagtcaggggccccaagctggacctgaaaggtcataaggcagaggtgacggcccacgaagtggctgtgtctctgcccagtgtggaggtggacatgcaggccccgggagccaagttggatggcgcacagctggacggggacctgtccctggctgacaaggacgtgactgccaaagacagcaagttcaaaatgcccaagttcaagatgccgtcgttcggggtgtctgccccaggcaagtccattgaggcctccgtggacctgtctgcacccaaggtggaggccgacatgagcctcccctccatgcagggggacctcaagaccactgacctcagcattcagcccccttccactgacctggagctccaggctggccaattggacgtgaaactcccagagggccccgtgcccgagggagccggcctcaaagggcacctgcccaagctgcagatgcccagtttcaaggtgcccaaagtggacctcaagggccctgaaatagacatcaagggccccaagctggacctaaaagaccccaaggtggaagtgacagcccctgatgtggaggtttctctgcccagcgtggaggtggatgtcgaggccccaggagccaagctggatggtggacggctggaggaggacatgtccctggccgacaaggacttgactaccaaagacagcaagttcaaaatgcccaagttcaagatgccgtcgttcggggtgtctgccccaggcaagtccatcgaggcctcagtggatgtgtctgcgccgaaggtggaggccgacgtgagcctcccctccatgcagggggacctcaaggccactgacctgagcatacagcccccttctgctgacctggaggtccaggctggccaagtggacgtgaaactcccagagggccctgtgtccgagggagccggcctcaaagggcacctgcccaaagtgcagatgcccagtttcaagatgcccaaagtggacctcaaggggccccagatagatgttaagggccccaagctggacctgaaaggccccaaggtggaagtgacagcccccgatgtgaagatgtctctgtccagcatggaggtggacgtccaggccccgagagcaaagctggatggtgcgcagctggagggggacctgtccctggccgacaaggcggtgactgccaaagacagcaagttcaaaatgcccaagttcaagatgccatcatttggggtgtcggccccaggcaagtccatcgaggcctcggtggatgtgtctgagccgaaggtggaagctgatgtgagcctcccctccatgcagggggacctgaagaccactgacctcagcattcagtccccttccgccgacctggaggtccaggctggccaagtgaacgtgaaactcccggagggcccccttcccgagggagccggcttcaaagggcacctccccaaggtgcagatgcccagtttgaagatgcccaaagtggccctcaagggcccccagatggacgtcaagggccccaagctggacctgaaaggccccaaggcggaggtgatggcccccgacgtggaggtgtctctgcccagcgtggaggtggacgtcgaggctccaggagccaagctggacagtgtgcggctggagggtgacctgtccctggccgacaaggatgtgactgccaaagacagcaagttcaaaatgcccaagttcaagatgccgtcgttcggggtgtctgccccaggcaagtccatcgaggcctcggtggatgtgtctgcgccgaaggtggaggccgaagtgagcctcccctccatgcagggggacctcaagaccacggacctctgcattccgctcccttctgcagacctggtggtccaggctggccaagtggacatgaagctcccggagggccaggtgcccgagggagccggcctcaaagggcacttgcccaaggtggatatgcccagtttcaagatgcccaaagtggacctcaagggcccccagacagatgttaagggcgccaagctggacctgaaaggccccaaggcggaagtgacagcccccgatgtcgaggtgtctctgcccagcatggaggtggatgtccaggcccagaaggctaagctggatggtgcgcggctggagggagacctgtccctggccgacaaggacatgactgccaaagacagcaagttcaaaatgcccaaattcaagatgccgtcgttcggggtatcggccccagggaggtccatcgaggcctcggtggatgtgcctgcacccaaggtggaggccgacgtgagtctcccctccatgcagggggacctgaagaccactgacctcagcattcagcccccttctgccgacctgaaggtccagactggccaggtggatgtgaagctcccggagggccacgtgcccgagggagctggcctcaaagggcacctgcccaaggtggagatgcccagtttgaagatgcccaaagtggacctcaagggcccccaggtggacatcaagggccccaaactggacctaaaagaccccaaggtggaaatgagagtccccgatgtcgaggtgtctctgcccagcatggaggtggacgtccaggccccaagagccaagctggatagtgcgcatctgcagggggacctgaccctggccaacaaggacctgactaccaaagacagcaagttcaaaatgcccaagttcaagatgccgtcgtttggggtgtctgccccaggcaagtccatcgaggcctcggtggatgtgtctccacccaaggtggaggccgacatgagtctcccctccatgcagggggacctcaagaccactgacctcagcattcagcccctttccgccgacgtgaaggtccaggctggccaggtggacgtgaaactcctggagggccctgtgcccgaggaagtcggcctcaaagggcacctgcccaagctgcagatgcccagtttcaaggtgcccaaagtggacctcaagggccccgaaatagacatcaagggccccaagctggacctaaaagaccccaaggtggaagtgacagcccctgatgtggaggtgtctctgcccagcgtggaggtggacgtcaaggccccaggagccaagctggatggtgcgcggctggagggggacatgtccctggccgacaaggacgtgactgccaaagacagcaagttcaaaatgcccaagttcaagatgctgtcgtttggggtgtctgcccttggcaagtccatcgaggcctcagcggatgtgtctgcgttgaaggtggaggccgacgtgagcctcccctccatgcagggggacctcaagaccactgacctcagcgttcagcccccttccgctgacctggaggtccaggctggccaagtggatgtgaaactcccagagggccccgtgccggagggagccggcctcaaagggcacctgcccaagctgcagatgcccagtttcaagatgcccaaagtagatctcaagggcccccagatagatgtcaagggccccaagctggacctgaaaggccccaagacggacgtgatggcccccgacgtggaggtgtctcagcccagcgtggaggtggatgtcgaggccccgggagccaagctggatggtgcgtggctggagggggacctgtctgtggcggacaaggatgtgactaccaaagacagcaggttcaaaattcccaagttcaagatgccgtcattcggggtgtctgccccaggcaagtccatcgaggcctcggtggatgtgtctgcgccgaaggtggaggccgacgggagcctctcctccatgcagggggacctcaaggccactgacctcagcattcagcccccttccgctgacctggaggtccaggctggccaagtggacgtgaaactcccagagggccctgtgccggagggagccggcctcaaagggcacctgcccaaggtgcagatgcccagtttcaagatgcctgaaatggacctcaagggcccccagctagatgtcaagggccccaagctggacctgaaaggccccaaggcggaagtgacagcccccgatgtggagatgtctctgtccagcatggaggtggacgtccaggccccgagagcaaagctggatggtgcgcggctggagggggacctgtccctggccgacaagggtgtgacagccaaagatagcaagttcaaaatgcccaagttcaagatgccatcattcagggtgtcggccccaggcgagtccatcgaggcgttggtggatgtgtctgagctgaaggtggaagccgacatgagcctcccctccatgcaaggggaccttaagaccactgacatcagcattcagcccccctctgcccaactggaggtccaggctggccaggtggatgtgaaactcccagagggccacgttcccgagggagccggcctcaaagggcacctgcccaagctgcagatgcccagtttcaagatgcctgaagtggacctcaagggcccccagatagatgttaagggccccaacgtggacctgaaaggccccaaggcggaagtgacagcccccgatgtgaagatgtctctgtccagcatggaggtggacgtccaggccccgagagcaaagctggatggtgcgcggctggagggggacctgtccctggccgacaagggcatgacagccaaagacagcaagttcaaaatgcccaagttcaagatgccgtcattcggggtgtcggccccaggcaagtccatcgaggcctcggtggatgtgtctgagctgaaggtggaagctgacgggagcttcccctccatgcaaggggatcttaagaccactgacatccgcattcagcccccctccgcccaactggaggtccaggctggccaggtggacgtgaaactcccagagggccacgttcccgagggagccggcctcaaagggcacctgcccaaggtgcagatgcccagtttcaagatgcccaaagtggatctcaagggcccccagatagacgtcaagggccccaagctggacctgaaaggccccaaggcggaggtgacggcccccgacgtggaggtgtctctgcccagcgtggaggtggacgtcgaggccccgagagcaaagctggatggtgcacggctggagggtgacctgtccctggccgacaaggatgtgactgccaaagacagcaagttcaaaatgcccaagttcaagatgccgtcgttcggggtgtctgccccaggcaagtccattgaggtctcggtggatgtgtctgcgccgaaggtggaggccgaagtgagcctcccctccatgcagggggacctgaagaccactgacatcagcattgagcccccctctgcccaactggaggtccaggctggccaggtggacctgaagctcccagagggccacgttcccgagggagctggcctcaaagggcacctgcccaagttgcagatgcccagtttcaagatgcccaaagtagatcgcaagggaccccagatagatgtcaagggccccaagctggacctgaaaggcccgaagacggacgtgacggcccccgacgtggaggtgtctcagcccggcatggaggtggatgtcgaggccccaggagccaagttggatggtgcacggctggagggggacctgtccctggccgacaaggatgtgactgccaaagacagcaagttcaaaatgcccaagttcaagatgccgtcgttcggggtgtctgccccaggcaagtccattgaggtcttggtggatgtgtctgcgccaaaggtggaggccgacctgagcctcccctccatgcagggggacctgaagaacactgacatcagcattgagcccccctctgcccaactggaggtccaggctggccaggtggacgtgaagctcccagagggccacgttctcgagggagctggcctcaaagggcacctgcccaagttgcagatgcccagtttcaagatgcccaaagtagatcgcaagggcccccagatagacatcaagggccccaagctggacctgaaaggcccgaagatggatgtgacggcccccgacgtggaggtgtctcagcccagcatggaggtggacgtcgaggccccaggagccaagttggatggtgcacggctggagggggacctgtccctggccgacaaggatgtgactgccaaagacagcaagttcaaaatgcccaaattcaagatgccgtcgtacagggcgtctgccccaggcaagtccatccaggcctcggtggatgtgtctgcgccgaaggcggaggccgacgtgagcctcccctccatgcagggggacctcaagaccactgacctcagcattcagctcccttctgtggacctggaggtccaggctggccaggtggacgtgaagctcccggagggccacgtgcccgagggagctggcctcaaagggcacctgcccaaggtggagatgcccagtttcaagatgcccaaagtggacctcaagagcccccaggtggacatcaagggccccaagctggacctaaaagtccccaaggcggaagtgacagtccctgatgtggaggtgtctctgcccagcgtggaggtggacgtccaggccccgagagccaagctggatggtgcgcggctggagggggacctgtccctggctgaaaaggatgtgactgccaaagacagcaagttcaaaatgcccaagttcaagatgccctccttcggggtgtcggccccaggcaggtccatcgaggcctcgctggatgtgtctgcgccgaaggtggaggccgacgtgagcctctcctccatgcagggggacctcaaggccactgacctcagcattcagcccccttccgctgacctggaggtccaggctgtccaagtggatgtggaactcctggagggccccgtgcccgagggagccggcctcaaagggcacctgcccaaagtggagatgcccagtttaaagacgcccaaagtggacctcaagggcccccagatagatgttaagggccccaagctggacctgaaaggccccaaggcagaagtgagagtccccgatgtcgaggtgtctctgcccagcgtggaggtggatgtccaggccccgaaggccaagctggatgctgggcggctggagggagacctgtccctggctgacaaggacgtgactgccaaagacagcaagttcaaaatgcccaaattcaagatgccgtcattcagggtatcggccccagggaagtccatggaggcctcggtggatgtgtctgcacccaaggtggaagccgatgtgagtctcccctccatgcagggggacctgaagaccactgacctcagcattcagcccccttctgccgacctgaaggtccaggctggccagatggatgtgaagctcccggagggccaggtgcccgagggagccggcctcaaagagcacctgcccaaggtggagatgcccagtttgaagatgcccaaagtggacctcaagggcccccaggtggacatcaagggccccaagctggacctaaaagtctccaaggcggaagtcacagcccctgatgtggaggtgtctctgcccagcgtggaggtggacgtccaggccccaagagccaaactggatagtgcacagctggagggggacctgtccctggccgacaaggatgtgactgccaaagacagcaaattcaaaatgcccaagttcaagatgccgtcatttggggtgtctgccccaggcaagtccattgaggcctcggtgcacgtgtctgcacccaaggtggaggccgatgtgagtctcccctccatgcagggggacctcaagaccactgacctcagcattcagccccattctgccgacctgacggtccaagctcgccaggtggacatgaaactcctggagggccacgtgcccgaggaagccggcctcaaaggacacctgcccaaggtgcagatgcccagtttcaagatgcccaaagtcgacctcaagggccctgaaatagacatcaagggccccaagctggacctaaaagaccccaaggtggaagtgacagcccctgatgtggaggtttctctgcccagcgtggaggtggacgtcgaggccccaggagccaagctggatggtgcgcggctggagggggacctgtccctggccgacaaggacatgacggccaaagacagcaagttcaaaatgcccaagttcaagatgccgtcgttcggggtgtctgccccaggcaagtccatggaggcatcagtggatgtgaccgcgccaaaggtggaggccgacgtgagcctcccttccatgcagggggacctcaaggccactgacctcagcgttcagcccccttccgctgacctggaggtccaggctggccaagtggacgtgaaactcccagagggccccgtgcccgagggagccagcctcaaagggcacctgcccaaggtgcagatgcccagtttcaagatgcccaaagtggacctcaagggcccccagatagatgttaagggccccaagctggacctgaaaggccccaaggcggaagtgacagcccctgatgtgaagatgtctctgtccagcatggaggtggacgtccaggccccgagagcaaagctggatggtgtgcagctggagggggacctgtccctggccgacaaggatgtgactgccaaagacagcaagttcaaaatgcccaagttcaagatgccatcattcggggtgtcggccccaggcaagtccatggaggcgtccgtggatgtgtctgagctgaaggcgaaagccgacgtgagcctcccctccatgcagggggacctcaagaccactgacctcagcattcagtccccttccgccgacctggaggtccaggctggccaagtggacgtgaaactcccggagggccccctgcccaagggagccggcctcaaagggcacctccccaaggtgcagatgccctgtttgaagatgcccaaagtggccctcaagggcccccaggtggatgtcaagggccccaagctggacctgaaaggccccaaggcggatgtgatgacccccgtcgtggaggtgtctctgcccagcatggaggtggacgtcgaggccccgggagccaagctggacagtgtgcggctggagggtgacctgtccctagccgacaaggacatgactgccaaagacagcaagttcaaaatgcccaagttcaagatgccgtcgttcggggtgtctgccccaggcaagtccatcgaggcctcgttggatgtgtctgcgctgaaggtggaggctgacgtgagcctcccctccatgcagggggacctgaagaccactcacctcagcattcagcccccttccgctgatctggaggtccaggctggccaagaggatgtgaaactcccagagggccctgtgcatgagggagccggcctcaaagggcacctgccgaagctgcagatgcccagtttcaaggtacccaaagtggacctcaagggtccccagatagacgttaatgtccccaagctggacctgaaaggccccaaggtggaggtgacgtcccccaacctggacgtgtctctgcccagcatggaggtggacatccaagccccaggagccaagctggacagtacgcggctggagggggacctgtccctggctgacaaggacgtgactgccaaagacagcaagttcaaaatgcccaagttcaagatgccatcctttgggatgttgtccccaggcaagtccatcgaggtctcggtggatgtgtctgcgccaaagatggaggccgacatgagcattccctccatgcagggggacctcaagaccactgacctccgcattcaggccccttccgccgacctggaggtccaggctggccaggtggacttgaaacttccagaaggccacatgcccgaggtagccggcctcaaagggcacctgcccaaggtggagatgcccagtttcaagatgcccaaagtggacctcaagggcccccaggtggacgtcaagggccccaagctggacctgaaaggcccaaaggcagaggtgatggcccccgatgtggaggtgtctctgcccagcgtggagacggatgtccaggccccaggatccatgctggatggtgcgcggcttgagggggacctgtccctggcccacgaggatgtagctgggaaagacagtaagtttcaaggaccaaaactgagcacgtctggttttgaatggtcgtcaaagaaagtttccatgtcttcctctgaaatcgaaggaaatgttacattccatgagaagacttccacatttcccattgtggaatctgttgttcatgaaggtgatcttcatgatccatctcgcgatggtaacttggggcttgctgttggagaagttggaatggattcgaagtttaagaaactgcattttaaagtgcccaaagtttcattttcttctaccaaaactcctaaagatagtttagtcccaggtttcggcttgttcagagccatccatgcagatgcctaa

SEQ ID NO: 36 - DNA, 2376 bp, Homo sapiens
cgcgcggcccctgtcctccggcccgagatgaatcctgcggcagaagccgagttcaacatcctcctggccaccgactcctacaaggttactcactataaacaatatccacccaacacaagcaaagtttattcctactttgaatgccgtgaaaagaagacagaaaactccaaattaaggaaggtgaaatatgaggaaacagtattttatgggttgcagtacattcttaataagtacttaaaaggtaaagtagtaaccaaagagaaaatccaggaagccaaagatgtctacaaagaacatttccaagatgatgtctttaatgaaaagggatggaactacattcttgagaagtatgatgggcatcttccaatagaaataaaagctgttcctgagggctttgtcattcccagaggaaatgttctcttcacggtggaaaacacagatccagagtgttactggcttacaaattggattgagactattcttgttcagtcctggtatccaatcacagtggccacaaattctagagagcagaagaaaatattggccaaatatttgttagaaacttctggtaacttagatggtctggaatacaagttacatgattttggctacagaggagtctcttcccaagagactgctggcataggagcatctgctcacttggttaacttcaaaggaacagatacagtagcaggacttgctctaattaaaaaatattatggaacgaaagatcctgttccaggctattctgttccagcagcagaacacagtaccataacagcttgggggaaagaccatgaaaaagatgcttttgaacatattgtaacacagttttcatcagtgcctgtatctgtggtcagcgatagctatgacatttataatgcgtgtgagaaaatatggggtgaagatctaagacatttaatagtatcgagaagtacacaggcaccactaataatcagacctgattctggaaaccctcttgacactgtgttaaaggttttggagattttaggtaagaagtttcctgttactgagaactcaaagggttacaagttgctgccaccttatcttagagttattcaaggggatggagtagatattaataccttacaagagattgtagaaggcatgaaacaaaaaatgtggagtattgaaaatattgccttcggttctggtggaggtttgctacagaagttgacaagagatctcttgaattgttccttcaagtgtagctatgttgtaactaatggccttgggattaacgtcttcaaggacccagttgctgatcccaacaaaaggtccaaaaagggccgattatctttacataggacgccagcagggaattttgttacactggaggaaggaaaaggagaccttgaggaatatggtcaggatcttctccatactgtcttcaagaatggcaaggtgacaaaaagctattcatttgatgaaataagaaaaaatgcacagctgaatattgaactggaagcagcacatcattaggctttatgactgggtgtgtgttgtgtgtatgtaatacataatgtttattgtacagatgtgtggggtttgtgttttatgatacattacagccaaattatttgttggtttatggacatactgccctttcattttttttcttttccagtgtttaggtgatctcaaattaggaaatgcatttaaccatgtaaaagatgagtgctaaagtaagctttttagggccctttgccaataggtagtcattcaatctggtattgatcttttcacaaataacagaactgagaaacttttatatataactgatgatcacataaaacagatttgcataaaattaccatgattgctttatgtttatatttaacttgtatttttgtacaaacaagattgtgtaagatatatttgaagtttcagtgatttaacagtctttccaacttttcatgatttttatgagcacagactttcaagaaaatacttgaaaataaattacattgccttttgtccattaatcagcaaataaaacatggccttaacaaagttgtttgtgttattgtacaatttgaaaattatgtcgggacataccctatagaattactaaccttactgccccttgtagaatatgtattaatcattctacattaaagaaaataatggttcttactggaatgtctaggcactgtacagttattatatatcttggttgttgtattgtaccagtgaaatgccaaatttgaaaggcctgtactgcaattttatatgtcagagattgcctgtggctctaatatgcacctcaagattttaaggagataatgtttttagagagaatttctgcttccactatagaatatatacataaatgtaaaatacttacaaaagtgg

SEQ ID NO: 37 - DNA, 884 bp, Homo sapiens
cagggcctgtccgtggccagcatccctgctgggcgattgagcagcgggaagctgcttggacccagtctcaaacttaaccctcatctagcacccgggcaggcctcctgggttgcagggacttgagaaaaggcagagttctcaggtcctaggaagctggggcacgctggcgtgacaagcgtcccggagaaagccaagccctcggggagctggggaccgcagcagggctgcagtcacatcctgcgcgggtgggcggcgggccaggccttcagttgtttcgggacgcgccgagcttcgccgctcttccagcggctccgctgccagagctagcctgagcccggttctggggcgaaaatgcctgcccttcacatcgaagatttgccagagaaggaaaaactgaaaatggaagttgagcagcttcgcaaagaagtgaagttgcagagacaacaagtgtctaaatgttctgaagaaataaagaactatattgaagaacgttctggagaggatcctctagtaaagggaattccagaagacaagaacccctttaaagaaaaaggcagctgtgttatttcataaataacttgggagaaactgcatcctaagtggaagaactagttgttttagttttcccagataaaaccaacatgctttttaaggaaggaagaatgaaattaaaaggagactttcttaagcaccatatagatagggttatgtataaaagcatatgtgctactcatctttgctcactatgcagtcttttttaagagagcagagagtatcagatgtacaattatggaaataagaacattacttgagcatgacacttctttcagtatattgcttgatgcttcaaataaagttttgtcttgggaaaaaaaaaaaaaaaa

SEQ ID NO: 38 - DNA, 2120 bp, Homo sapiens
gctgcccgggctgcgcggcgtctgcaggcgccaccgctgcctctttccggctgtgaccctcctcgccggcgccgcttggctgcgtcctccgactccccgcgccgccgagaccaggctcccgctccggttgcggccgcaccgccctccgcggccgccccctggggatccagcgagcgcggtcgtccttggtggaaggaaccatgaactggcatctccccctcttcctcttggcctctgtgacgctgccttccatctgctcccacttcaatcctctgtctctcgaggaactaggctccaacacggggatccaggttttcaatcagattgtgaagtcgaggcctcatgacaacatcgtgatctctccccatgggattgcgtcggtcctggggatgcttcagctgggggcggacggcaggaccaagaagcagctcgccatggtgatgagatacggcgtaaatggagttggtaaaatattaaagaagatcaacaaggccatcgtctccaagaagaataaagacattgtgacagtggctaacgccgtgtttgttaagaatgcctctgaaattgaagtgccttttgttacaaggaacaaagatgtgttccagtgtgaggtccggaatgtgaactttgaggatccagcctctgcctgtgattccatcaatgcatgggttaaaaatgaaaccagggatatgattgacaatctgctgtccccagatcttattgatggtgtgctcaccagactggtcctcgtcaacgcagtgtatttcaagggtctgtggaaatcacggttccaacccgagaacacaaagaaacgcactttcgtggcagccgacgggaaatcctatcaagtgccaatgctggcccagctctccgtgttccggtgtgggtcgacaagtgcccccaatgatttatggtacaacttcattgaactgccctaccacggggaaagcatcagcatgctgattgcactgccgactgagagctccactccgctgtctgccatcatcccacacatcagcaccaagaccatagacagctggatgagcatcatggtgcccaagagggtgcaggtgatcctgcccaagttcacagctgtagcacaaacagatttgaaggagccgctgaaagttcttggcattactgacatgtttgattcatcaaaggcaaattttgcaaaaataacaacagggtcagaaaacctccatgtttctcatatcttgcaaaaagcaaaaattgaagtcagtgaagatggaaccaaagcttcagcagcaacaactgcaattctcattgcaagatcatcgcctccctggtttatagtagacagaccttttctgtttttcatccgacataatcctacaggtgctgtgttattcatggggcagataaacaaaccctgaagagtatacaaaagaaaccatgcaaagcaacgactactttgctacgaagaaagactcctttcctgcatctttcatagttctgttaaatatttttgtacatcgcttctttttcaaaactagttcttaggaacagactcgatgcaagtgtttctgttctgggaggtattggagggaaaaaacagcaggatggctggaacactgtactgaggaatgaatagaaaggcttccagatgtctaaaagattctttaaactactgaactgttacctaggttaacaaccctgttgagtatttgctgtttgtccagttcaggaatttttgttttgttttgtctatatgtgcggcttttcagaagaaatttaatcagtgtgacagaaaaaaaaaatgttttatggtagcttttactttttatgaaaaaaaaattatttgccttttaaattcttttcccccatccccctccaaagtcttgatagcaagcgttattttgggggtagaaacggtgaaatctctagcctctttgtgtttttgttgttgttgttgttgttgttttatataatgcatgtattcactaaaataaaatttaaaaaactcctgtcttgctagacaaggttgctgttgtgcagtgtgcctgtcactactggtctgtactccttggatttgcatttttgtattttgtacaaagtaaaaataaactgttatgagtagtaaaaaaaaaaaaaaaaaa

SEQ ID NO: 39 - DNA, 2737 bp, Homo sapiens
ctgaacctcagccgcgccgggaggcgagcccgttggcgaggggcggggcagatggcgagggagcggggcgagctgctttttgaggctgcgcactcgcatggccccacctcgcaggtccacttccggcgccgcggctgttccgggcggagaccgcttgtgctggagtcggagttgtaacgctccactgactgatagagcgaccggccgaccatggcgcccggagtggcccgcgggccgacgccgtactggaggttgcgcctcggtggcgccgcgctgctcctgctgctcatcccggtggccgccgcgcaggagcctcccggagctgcttgttctcagaacacaaacaaaacctgtgaagagtgcctgaagaacgtctcctgtctttggtgcaacactaacaaggcttgtctggactacccagttacaagcgtcttgccaccggcttccctttgtaaattgagctctgcacgctggggagtttgttgggtgaactttgaggcgctgatcatcaccatgtcggtagtcgggggaaccctcctcctgggcattgccatctgctgctgctgctgctgcaggaggaagaggagccggaagccggacaggagtgaggagaaggccatgcgtgagcgggaggagaggcggatacggcaggaggaacggagagcagagatgaagacaagacatgatgaaatcagaaaaaaatatggcctgtttaaagaagaaaacccgtatgctagatttgaaaacaactaaagcgctccagcacatcagtcccgacgcttcctgtgaggtgcacgctccgcagcccagcccagccgggagaccacgtggccattgcggtctcctgaccttggccagtgaacctgccagccttccaggacaggcggccggagagctgcccctgaaggacagtcctctcgtcttgcagactggtgaccttctattccctgttcatctctgtttctagatttagtcacttgaaataagaaatctttggggtttgggcttttttatactcttctcagtttgtgaaacgctaactgcacacgaagccgcctgacggcacccagcgctgtggctgtcattctcccagggcagaaccctgcgtttctctctgtccactaacaagcttcacacgcaacacagggaagtcggtttgacttttgtcatgaggagaactgaccagccctcatcattccccataaaaccacggacagcgtctgtgtgcgcatcttgagtcttcacacctgttgactcacacggcttttgctgatgacacggggctccagtacacagtctgataaggacttaacgtcctaacctcaattgtattaaatagcattggggaatagctaaacctttttaaaaaaatttattggattttcctccctgcttaaaagatttcaccagaaaaccttcatataaaaattcaggccctttttggacaatttttaaaatttgtatctttactagaacatgagaatctttttcccttggaagcttgaattataaatgtggtgtttggcctgcctcagcagcaccagttgactgctcgtgtgccagcggtgtggggaggacggggcaggacgctgcagctctctccagccctgttggcatcctcagtgcctgcaggcctctcgctgcctgttgggctgtctggggggtggccatttagggatcgtggggacggggtccaccccaagaagaaagaaaggcccgtccacaggcccggctctgggccacgtgccccggaagcaggtgtgtccagagtcagctgagggctctccccacaccacccagcaggcgctggtgctccttctgcctcatgggaccagtccagcttccagccgctctggctcgagggtggtctgagcacttccttctgagtgggcttctctgggagctctccagtggcactgctggacctgcccacgtttctgtaaaatcaggatacgtggctttagtaagcagaccaagcgcttcgtggcagggaaagcagcgtgcggggaagtcactgaaaagtgctgcctaaggaagtttggaaatagtccccgttccagattgccttgaattttaaaacattttgctttgggaaagtaggtcagcagcacctaagatcaaggatgcgttccattttcacacttcacagtcatgaaaactgagaagactgtcttcagcgtgaactaaagttcacaggcagatcactgatccagaacacttcaagaactcgtcaaacagctcgataagcctttttgactgtgtacatctgtaccgggaataacattcctaggctgaaatttccacaaagaatagaacctgtacccagttcttcaggctgatttccctgacctcttgggcatttgtatttgtagtaaagtattgcagagattcctaagtattttatagcagccatcaaaattggactttgtattgtttattcataaaagacacttggtaatagacttcagtgaactctgtatgaatgcagtagtgtgcgtgcaaaatccgcttcctgagcgtagggtgctgagctggcgctagggctcggttgtgaaatacagcgtagtcagcccttgcgctcagtgtagaaacccacgtctgtaaggtcggtcttcgtccatctgcttttttctgaaatacactaagagcagccacaaaactgtaacctcaaggaaaccataaagcttggagtgccttaatttttaaccagtttccaataaaacggtttactacctga

SEQ ID NO: 40 - DNA, 1407 bp, Homo sapiens
cgcgaatcgcagcttctgagaccagggttgctccgtccgtgctccgcctcgccatgacttcctacagctatcgccagtcgtcggccacgtcgtccttcggaggcctgggcggcggctccgtgcgttttgggccgggggtcgcctttcgcgcgcccagcattcacgggggctccggcggccgcggcgtatccgtgtcctccgcccgctttgtgtcctcgtcctcctcgggggcctacggcggcggctacggcggcgtcctgaccgcgtccgacgggctgctggcgggcaacgagaagctaaccatgcagaacctcaacgaccgcctggcctcctacctggacaaggtgcgcgccctggaggcggccaacggcgagctagaggtgaagatccgcgactggtaccagaagcaggggcctgggccctcccgcgactacagccactactacacgaccatccaggacctgcgggacaagattcttggtgccaccattgagaactccaggattgtcctgcagatcgacaatgcccgtctggctgcagatgacttccgaaccaagtttgagacggaacaggctctgcgcatgagcgtggaggccgacatcaacggcctgcgcagggtgctggatgagctgaccctggccaggaccgacctggagatgcagatcgaaggcctgaaggaagagctggcctacctgaagaagaaccatgaggaggaaatcagtacgctgaggggccaagtgggaggccaggtcagtgtggaggtggattccgctccgggcaccgatctcgccaagatcctgagtgacatgcgaagccaatatgaggtcatggccgagcagaaccggaaggatgctgaagcctggttcaccagccggactgaagaattgaaccgggaggtcgctggccacacggagcagctccagatgagcaggtccgaggttactgacctgcggcgcacccttcagggtcttgagattgagctgcagtcacagctgagcatgaaagctgccttggaagacacactggcagaaacggaggcgcgctttggagcccagctggcgcatatccaggcgctgatcagcggtattgaagcccagctgggcgatgtgcgagctgatagtgagcggcagaatcaggagtaccagcggctcatggacatcaagtcgcggctggagcaggagattgccacctaccgcagcctgctcgagggacaggaagatcactacaacaatttgtctgcctccaaggtcctctgaggcagcaggctctggggcttctgctgtcctttggagggtgtcttctgggtagagggatgggaaggaagggacccttacccccggctcttctcctgacctgccaataaaaatttatggtccaagggaaaaaaaaaaaaaaaaaaaaaaaaaa

SEQ ID NO: 41 - DNA, 1320 bp, Homo sapiens; identical to SEQ ID NO: 11

SEQ ID NO: 42 - DNA, 2986 bp, Homo sapiens
gcgccccagtcgacgctgagctcctctgctactcagagttgcaacctcagcctcgctatggctcccagcagcccccggcccgcgctgcccgcactcctggtcctgctcggggctctgttcccaggacctggcaatgcccagacatctgtgtccccctcaaaagtcatcctgccccggggaggctccgtgctggtgacatgcagcacctcctgtgaccagcccaagttgttgggcatagagaccccgttgcctaaaaaggagttgctcctgcctgggaacaaccggaaggtgtatgaactgagcaatgtgcaagaagatagccaaccaatgtgctattcaaactgccctgatgggcagtcaacagctaaaaccttcctcaccgtgtactggactccagaacgggtggaactggcacccctcccctcttggcagccagtgggcaagaaccttaccctacgctgccaggtggagggtggggcaccccgggccaacctcaccgtggtgctgctccgtggggagaaggagctgaaacgggagccagctgtgggggagcccgctgaggtcacgaccacggtgctggtgaggagagatcaccatggagccaatttctcgtgccgcactgaactggacctgcggccccaagggctggagctgtttgagaacacctcggccccctaccagctccagacctttgtcctgccagcgactcccccacaacttgtcagcccccgggtcctagaggtggacacgcaggggaccgtggtctgttccctggacgggctgttcccagtctcggaggcccaggtccacctggcactgggggaccagaggttgaaccccacagtcacctatggcaacgactccttctcggccaaggcctcagtcagtgtgaccgcagaggacgagggcacccagcggctgacgtgtgcagtaatactggggaaccagagccaggagacactgcagacagtgaccatctacagctttccggcgcccaacgtgattctgacgaagccagaggtctcagaagggaccgaggtgacagtgaagtgtgaggcccaccctagagccaaggtgacgctgaatggggttccagcccagccactgggcccgagggcccagctcctgctgaaggccaccccagaggacaacgggcgcagcttctcctgctctgcaaccctggaggtggccggccagcttatacacaagaaccagacccgggagcttcgtgtcctgtatggcccccgactggacgagagggattgtccgggaaactggacgtggccagaaaattcccagcagactccaatgtgccaggcttgggggaacccattgcccgagctcaagtgtctaaaggatggcactttcccactgcccatcggggaatcagtgactgtcactcgagatcttgagggcacctacctctgtcgggccaggagcactcaaggggaggtcacccgcgaggtgaccgtgaatgtgctctccccccggtatgagattgtcatcatcactgtggtagcagccgcagtcataatgggcactgcaggcctcagcacgtacctctataaccgccagcggaagatcaagaaatacagactacaacaggcccaaaaagggacccccatgaaaccgaacacacaagccacgcctccctgaacctatcccgggacagggcctcttcctcggccttcccatattggtggcagtggtgccacactgaacagagtggaagacatatgccatgcagctacacctaccggccctgggacgccggaggacagggcattgtcctcagtcagatacaacagcatttggggccatggtacctgcacacctaaaacactaggccacgcatctgatctgtagtcacatgactaagccaagaggaaggagcaagactcaagacatgattgatggatgttaaagtctagcctgatgagaggggaagtggtgggggagacatagccccaccatgaggacatacaactgggaaatactgaaacttgctgcctattgggtatgctgaggcccacagacttacagaagaagtggccctccatagacatgtgtagcatcaaaacacaaaggcccacacttcctgacggatgccagcttgggcactgctgtctactgaccccaacccttgatgatatgtatttattcatttgttattttaccagctatttattgagtgtcttttatgtaggctaaatgaacataggtctctggcctcacggagctcccagtccatgtcacattcaaggtcaccaggtacagttgtacaggttgtacactgcaggagagtgcctggcaaaaagatcaaatggggctgggacttctcattggccaacctgcctttccccagaaggagtgatttttctatcggcacaaaagcactatatggactggtaatggttcacaggttcagagattacccagtgaggccttattcctcccttccccccaaaactgacacctttgttagccacctccccacccacatacatttctgccagtgttcacaatgacactcagcggtcatgtctggacatgagtgcccagggaatatgcccaagctatgccttgtcctcttgtcctgtttgcatttcactgggagcttgcactattgcagctccagtttcctgcagtgatcagggtcctgcaagcagtggggaagggggccaaggtattggaggactccctcccagctttggaagggtcatccgcgtgtgtgtgtgtgtgtatgtgtagacaagctctcgctctgtcacccaggctggagtgcagtggtgcaatcatggttcactgcagtcttgaccttttgggctcaagtgatcctcccacctcagcctcctgagtagctgggaccataggctcacaacaccacacctggcaaatttgattttttttttttttttcagagacggggtctcgcaacattgcccagacttcctttgtgttagttaataaagctttctcaactgcc

SEQ ID NO: 43 - DNA, 3917 bp, Homo sapiens
tagtcggagcgaggtggcgagtcgctgagcccgccgcggccccgagagcggctgcagccgccgccgccgggaaggagagggcgaggcgcgcccgagccgccgccgccgccgccaccgccgccgccgccaccaccgccaccggagtcgcgggccagccgggcagcctccgcgggccccggccggggcggggggcgcgggccacaggcccctgctccggccgtcgtttgcagaccgcgggcgccgatgtcgcccgcgccccgttaggatgagtctcgggtcgggcgaggagccgccgcagccgccgccgcccgagccgcgggcaggagcctcgggagccgccgccgccgccgccgccgcccggccgggccccgacgccgcccgcgcgcccccgggcccccgacacacatgagattcttcaggctcactttcaagtgcttcgtggactgcttctgactgcgccgcccgcgccccgcaccccgccgtccgcccgccgccccgtcccccggcccggccgccccccggcccccggccggcccgcgccctcggggccctccccggtgccgccggtgccccccgcctgaccgccgccccccgtgaggcgccgcgaccccggcccggccgtgcggcccgccggggccatggcgaagaagagcgccgagaacggcatctatagcgtgtccggcgacgagaagaagggccccctcatcgcgcccgggcccgacggggccccggccaagggcgacggccccgtgggcctggggacacccggcggccgcctggccgtgccgccgcgcgagacctggacgcgccagatggacttcatcatgtcgtgcgtgggcttcgccgtgggcttgggcaacgtgtggcgcttcccctacctgtgctacaagaacggcggaggtgtgttccttattccctacgtcctgatcgccctggttggaggaatccccattttcttcttagagatctcgctgggccagttcatgaaggccggcagcatcaatgtctggaacatctgtcccctgttcaaaggcctgggctacgcctccatggtgatcgtcttctactgcaacacctactacatcatggtgctggcctggggcttctattacctggtcaagtcctttaccaccacgctgccctgggccacatgtggccacacctggaacactcccgactgcgtggagatcttccgccatgaagactgtgccaatgccagcctggccaacctcacctgtgaccagcttgctgaccgccggtcccctgtcatcgagttctgggagaacaaagtcttgaggctgtctgggggactggaggtgccaggggccctcaactgggaggtgaccctttgtctgctggcctgctgggtgctggtctacttctgtgtctggaagggggtcaaatccacgggaaagatcgtgtacttcactgctacattcccctacgtggtcctggtcgtgctgctggtgcgtggagtgctgctgcctggcgccctggatggcatcatttactatctcaagcctgactggtcaaagctggggtcccctcaggtgtggatagatgcggggacccagattttcttttcttacgccattggcctgggggccctcacagccctgggcagctacaaccgcttcaacaacaactgctacaaggacgccatcatcctggctctcatcaacagtgggaccagcttctttgctggcttcgtggtcttctccatcctgggcttcatggctgcagagcagggcgtgcacatctccaaggtggcagagtcagggccgggcctggccttcatcgcctacccgcgggctgtcacgctgatgccagtggccccactctgggctgccctgttcttcttcatgctgttgctgcttggtctcgacagccagtttgtaggtgtggagggcttcatcaccggcctcctcgacctcctcccggcctcctactacttccgtttccaaagggagatctctgtggccctctgttgtgccctctgctttgtcatcgatctctccatggtgactgatggcgggatgtacgtcttccagctgtttgactactactcggccagcggcaccaccctgctctggcaggccttttgggagtgcgtggtggtggcctgggtgtacggagctgaccgcttcatggacgacattgcctgtatgatcgggtaccgaccttgcccctggatgaaatggtgctggtccttcttcaccccgctggtctgcatgggcatcttcatcttcaacgttgtgtactacgagccgctggtctacaacaacacctacgtgtacccgtggtggggtgaggccatgggctgggccttcgccctgtcctccatgctgtgcgtgccgctgcacctcctgggctgcctcctcagggccaagggcaccatggctgagcgctggcagcacctgacccagcccatctggggcctccaccacttggagtaccgagctcaggacgcagatgtcaggggcctgaccaccctgaccccagtgtccgagagcagcaaggtcgtcgtggtggagagtgtcatgtgacaactcagctcacatcaccagctcacctctggtagccatagcagcccctgcttcagccccaccgcacccctccagggggcctgcctttccctgacacttttggggtctgcctgggggaggaggggagaaagcaccatgagtgctcactaaaacaactttttccatttttaataaaacgccaaaaatatcacaacccaccaaaaatagatgcctctccccctccagccctagccgagctggtcctaggccccgcctagtgccccacccccacccacagtgctgcactcctcctgcccctgccacgcccaccccctgcccacctctccaggctctgctctgcagcacacccgtgggtgacccctcaccccagaagcagcagtggcagcttgggaaatgtgaggaagggaaggagggagagacgggagggaggagagagaggagaagggaggcaggggaggggcagcagaaccaaggcaaatatttcagctgggctatacccctctccccatccctgttatagaagcttagagagccagccagcaatggaaccttctggttcctgcgccaatcgccaccagtatcaattgtgtgagcttgggtgcgagtgcacgcgtgcgtgagtacggagagtatatatagatctctatctcttagcaaaggtgaatgccagatgtaaatggcgcctctgggcaaaggaggcttgtattttgcacattttataaaaacttgagagaatgagatttctgcttgtatatttctaaaaagaggaaggagcccaaaccatcctctccttaccactcccatccctgtgagccctaccttacccctctgcccctagccaaggagtgtgaatttatagatctaactttcataggcaaaacaaaagcttcgagctgttgcgtgtgtgagtctgttgtgtggatgtgcgtgtgtggtccccagccccagactggattggaaaagtgcatggtgggggcctcggggctgtccccacgctgtccctttgccacaagtctgtggggcaagaggctgcaatattccgtcctgggtgtctgggctgctaacctggcctgctcaggcttcccaccctgtgcggggcacacccccaggaagggaccctggacacggctcccacgtccaggcttaaggtggatgcacttcccgcacctccagtcttctgtgtagcagctttaacccacgtttgtctgtcacgtccagtcccgagacggctgagtgaccccaagaaaggcttccccgacacccagacagaggctgcagggctggggctgggtgagggtggcgggcctgcggggacattctactgtgctaaaaagccactgcagacatagcaataaaaacatgtcattttcc

SEQ ID NO: 44 - DNA, 1666 bp, Homo sapiens
ctccataaggcacaaactttcagagacagcagagcacacaagcttctaggacaagagccaggaagaaaccaccggaaggaaccatctcactgtgtgtaaacatgacttccaagctggccgtggctctcttggcagccttcctgatttctgcagctctgtgtgaaggtgcagttttgccaaggagtgctaaagaacttagatgtcagtgcataaagacatactccaaacctttccaccccaaatttatcaaagaactgagagtgattgagagtggaccacactgcgccaacacagaaattattgtaaagctttctgatggaagagagctctgtctggaccccaaggaaaactgggtgcagagggttgtggagaagtttttgaagagggctgagaattcataaaaaaattcattctctgtggtatccaagaatcagtgaagatgccagtgaaacttcaagcaaatctacttcaacacttcatgtattgtgtgggtctgttgtagggttgccagatgcaatacaagattcctggttaaatttgaatttcagtaaacaatgaatagtttttcattgtaccatgaaatatccagaacatacttatatgtaaagtattatttatttgaatctacaaaaaacaacaaataatttttaaatataaggattttcctagatattgcacgggagaatatacaaatagcaaaattgaggccaagggccaagagaatatccgaactttaatttcaggaattgaatgggtttgctagaatgtgatatttgaagcatcacataaaaatgatgggacaataaattttgccataaagtcaaatttagctggaaatcctggatttttttctgttaaatctggcaaccctagtctgctagccaggatccacaagtccttgttccactgtgccttggtttctcctttatttctaagtggaaaaagtattagccaccatcttacctcacagtgatgttgtgaggacatgtggaagcactttaagttttttcatcataacataaattattttcaagtgtaacttattaacctatttattatttatgtatttatttaagcatcaaatatttgtgcaagaatttggaaaaatagaagatgaatcattgattgaatagttataaagatgttatagtaaatttattttattttagatattaaatgatgttttattagataaatttcaatcagggtttttagattaaacaaacaaacaattgggtacccagttaaattttcatttcagataaacaacaaataattttttagtataagtacattattgtttatctgaaattttaattgaactaacaatcctagtttgatactcccagtcttgtcattgccagctgtgttggtagtgctgtgttgaattacggaataatgagttagaactattaaaacagccaaaactccacagtcaatattagtaatttcttgctggttgaaacttgtttattatgtacaaatagattcttataatattatttaaatgactgcatttttaaatacaaggctttatatttttaactttaagatgtttttatgtgctctccaaattttttttactgtttctgattgtatggaaatataaaagtaaatatgaaacatttaaaatataatttgttgtcaaagtaaaaaaaaaaaaaaa

SEQ ID NO: 45 - DNA, 11185 bp, Homo sapiens
gctgccccgagcctttctggggaagaactccaggcgtgcggacgcaacagccgagaacattaggtgttgtggacaggagctgggaccaagatcttcggccagccccgcatcctcccgcatcttccagcaccgtcccgcaccctccgcatccttccccgggccaccacgcttcctatgtgacccgcctgggcaacgccgaacccagtcgcgcagcgctgcagtgaattttccccccaaactgcaataagccgccttccaaggccaagatgttcataaatataaagagcatcttatggatgtgttcaaccttaatagtaacccatgcgctacataaagtcaaagtgggaaaaagcccaccggtgaggggctccctctctggaaaagtcagcctaccttgtcatttttcaacgatgcctactttgccacccagttacaacaccagtgaatttctccgcatcaaatggtctaagattgaagtggacaaaaatggaaaagatttgaaagagactactgtccttgtggcccaaaatggaaatatcaagattggtcaggactacaaagggagagtgtctgtgcccacacatcccgaggctgtgggcgatgcctccctcactgtggtcaagctgctggcaagtgatgcgggtctttaccgctgtgacgtcatgtacgggattgaagacacacaagacacggtgtcactgactgtggatggggttgtgtttcactacagggcggcaaccagcaggtacacactgaattttgaggctgctcagaaggcttgtttggacgttggggcagtcatagcaactccagagcagctctttgctgcctatgaagatggatttgagcagtgtgacgcaggctggctggctgatcagactgtcagatatcccatccgggctcccagagtaggctgttatggagataagatgggaaaggcaggagtcaggacttatggattccgttctccccaggaaacttacgatgtgtattgttatgtggatcatctggatggtgatgtgttccacctcactgtccccagtaaattcaccttcgaggaggctgcaaaagagtgtgaaaaccaggatgccaggctggcaacagtgggggaactccaggcggcatggaggaacggctttgaccagtgcgattacgggtggctgtcggatgccagcgtgcgccaccctgtgactgtggccagggcccagtgtggaggtggtctacttggggtgagaaccctgtatcgttttgagaaccagacaggcttccctccccctgatagcagatttgatgcctactgctttaaacctaaagaggctacaaccatcgatttgagtatcctcgcagaaactgcatcacccagtttatccaaagaaccacaaatggtttctgatagaactacaccaatcatccctttagttgatgaattacctgtcattccaacagagttccctcccgtgggaaatattgtcagttttgaacagaaagccacagtccaacctcaggctatcacagatagtttagccaccaaattacccacacctactggcagtaccaagaagccctgggatatggatgactactcaccttctgcttcaggacctcttggaaagctagacatatcagaaattaaggaagaagtgctccagagtacaactggcgtctctcattatgctacggattcatgggatggtgtcgtggaagataaacaaacacaagaatcggttacacagattgaacaaatagaagtgggtcctttggtaacatctatggaaatcttaaagcacattccttccaaggaattccctgtaactgaaacaccattggtaactgcaagaatgatcctggaatccaaaactgaaaagaaaatggtaagcactgtttctgaattggtaaccacaggtcactatggattcaccttgggagaagaggatgatgaagacagaacacttacagttggatctgatgagagcaccttgatctttgaccaaattcctgaagtcattacggtgtcaaagacttcagaagacaccatccacactcatttagaagacttggagtcagtctcagcatccacaactgtttcccctttaattatgcctgataataatggatcatccatggatgactgggaagagagacaaactagtggtaggataacggaagagtttcttggcaaatatctgtctactacaccttttccatcacagcatcgtacagaaatagaattgtttccttattctggtgataaaatattagtagagggaatttccacagttatttatccttctctacaaacagaaatgacacatagaagagaaagaacagaaacactaataccagagatgagaacagatacttatacagatgaaatacaagaagagatcactaaaagtccatttatgggaaaaacagaagaagaagtcttctctgggatgaaactctctacatctctctcagagccaattcatgttacagagtcttctgtggaaatgaccaagtcttttgatttcccaacattgataacaaagttaagtgcagagccaacagaagtaagagatatggaggaagactttacagcaactccaggtactacaaaatatgatgaaaatattacaacagtgcttttggcccatggtactttaagtgttgaagcagccactgtatcaaaatggtcatgggatgaagataatacaacatccaagcctttagagtctacagaaccttcagcctcttcaaaattgccccctgccttactcacaactgtggggatgaatggaaaggataaagacatcccaagtttcactgaagatggagcagatgaatttactcttattccagatagtactcaaaagcagttagaggaggttactgatgaagacatagcagcccatggaaaattcacaattagatttcagccaactacatcaactggtattgcagaaaagtcaactttgagagattctacaactgaagaaaaagttccacctatcacaagcactgaaggccaagtttatgcaaccatggaaggaagtgctttgggtgaagtagaagatgtggacctctctaagccagtatctactgttccccaatttgcacacacttcagaggtggaaggattagcatttgttagttatagtagcacccaagagcctactacttatgtagactcttcccataccattcctctttctgtaattcccaagacagactggggagtgttagtaccttctgttccatcagaagatgaagttctaggtgaaccctctcaagacatacttgtcattgatcagactcgccttgaagcgactatttctccagaaactatgagaacaacaaaaatcacagagggaacaactcaggaagaattcccttggaaagaacagactgcagagaaaccagttcctgctctcagttctacagcttggactcccaaggaggcagtaacaccactggatgaacaagagggcgatggatcagcatatacagtctctgaagatgaattgttgacaggttctgagagggtcccagttttagaaacaactccagttggaaaaattgatcacagtgtgtcttatccaccaggtgctgtaactgagcacaaagtgaaaacagatgaagtggtaacactaacaccacgcattgggccaaaagtatctttaagtccagggcctgaacaaaaatatgaaacagaaggtagtagtacaacaggatttacatcatctttgagtccttttagtacccacattacccagcttatggaagaaaccactactgagaaaacatccctagaggatattgatttaggctcaggattatttgaaaagcccaaagccacagaactcatagaattttcaacaatcaaagtcacagttccaagtgatattaccactgccttcagttcagtagacagacttcacacaacttcagcattcaagccatcttccgcgatcactaagaaaccacctctcatcgacagggaacctggtgaagaaacaaccagtgacatggtaatcattggagaatcaacatctcatgttcctcccactacccttgaagatattgtagccaaggaaacagaaaccgatattgatagagagtatttcacgacttcaagtcctcctgctacacagccaacaagaccacccactgtggaagacaaagaggcctttggacctcaggcgctttctacgccacagcccccagcaagcacaaaatttcaccctgacattaatgtttatattattgaggtcagagaaaataagacaggtcgaatgagtgatttgagtgtaattggtcatccaatagattcagaatctaaagaagatgaaccttgtagtgaagaaacagatccagtgcatgatctaatggctgaaattttacctgaattccctgacataattgaaatagacctataccacagtgaagaaaatgaagaagaagaagaagagtgtgcaaatgctactgatgtgacaaccaccccatctgtgcagtacataaatgggaagcatctcgttaccactgtgcccaaggacccagaagctgcagaagctaggcgtggccagtttgaaagtgttgcaccttctcagaatttctcggacagctctgaaagtgatactcatccatttgtaatagccaaaacggaattgtctactgctgtgcaacctaatgaatctacagaaacaactgagtctcttgaagttacatggaagcctgagacttaccctgaaacatcagaacatttttcaggtggtgagcctgatgttttccccacagtcccattccatgaggaatttgaaagtggaacagccaaaaaaggggcagaatcagtcacagagagagatactgaagttggtcatcaggcacatgaacatactgaacctgtatctctgtttcctgaagagtcttcaggagagattgccattgaccaagaatctcagaaaatagcctttgcaagggctacagaagtaacatttggtgaagaggtagaaaaaagtacttctgtcacatacactcccactatagttccaagttctgcatcagcatatgtttcagaggaagaagcagttaccctaataggaaatccttggccagatgacctgttgtctaccaaagaaagctgggtagaagcaactcctagacaagttgtagagctctcagggagttcttcgattccaattacagaaggctctggagaagcagaagaagatgaagatacaatgttcaccatggtaactgatttatcacagagaaatactactgatacactcattactttagacactagcaggataatcacagaaagcttttttgaggttcctgcaaccaccatttatccagtttctgaacaaccttctgcaaaagtggtgcctaccaagtttgtaagtgaaacagacacttctgagtggatttccagtaccactgttgaggaaaagaaaaggaaggaggaggagggaactacaggtacggcttctacatttgaggtatattcatctacacagagatcggatcaattaattttaccctttgaattagaaagtccaaatgtagctacatctagtgattcaggtaccaggaaaagttttatgtccttgacaacaccaacacagtctgaaagggaaatgacagattctactcctgtctttacagaaacaaatacattagaaaatttgggggcacagaccactgagcacagcagtatccatcaacctggggttcaggaagggctgaccactctcccacgtagtcctgcctctgtctttatggagcagggctctggagaagctgctgccgacccagaaaccaccactgtttcttcattttcattaaacgtagagtatgcaattcaagccgaaaaggaagtagctggcactttgtctccgcatgtggaaactacattctccactgagccaacaggactggttttgagtacagtaatggacagagtagttgctgaaaatataacccaaacatccagggaaatagtgatttcagagcgattaggagaaccaaattatggggcagaaataaggggcttttccacaggttttcctttggaggaagatttcagtggtgactttagagaatactcaacagtgtctcatcccatagcaaaagaagaaacggtaatgatggaaggctctggagatgcagcatttagggacacccagacttcaccatctacagtacctacttcagttcacatcagtcacatatctgactcagaaggacccagtagcaccatggtcagcacttcagccttcccctgggaagagtttacatcctcagctgagggctcaggtgagcaactggtcacagtcagcagctctgttgttccagtgcttcccagtgctgtgcaaaagttttctggtacagcttcctccattatcgacgaaggattgggagaagtgggtactgtcaatgaaattgatagaagatccaccattttaccaacagcagaagtggaaggtacgaaagctccagtagagaaggaggaagtaaaggtcagtggcacagtttcaacaaactttccccaaactatagagccagccaaattatggtctaggcaagaagtcaaccctgtaagacaagaaattgaaagtgaaacaacatcagaggaacaaattcaagaagaaaagtcatttgaatcccctcaaaactctcctgcaacagaacaaacaatctttgattcacagacatttactgaaactgaactcaaaaccacagattattctgtactaacaacaaagaaaacttacagtgatgataaagaaatgaaggaggaagacacttctttagttaacatgtctactccagatccagatgcaaatggcttggaatcttacacaactctccctgaagctactgaaaagtcacattttttcttagctactgcattagtaactgaatctataccagctgaacatgtagtcacagattcaccaatcaaaaaggaagaaagtacaaaacattttccgaaaggcatgagaccaacaattcaagagtcagatactgagctcttattctctggactgggatcaggagaagaagttttacctactctaccaacagagtcagtgaattttactgaagtggaacaaatcaataacacattatatccccacacttctcaagtggaaagtacctcaagtgacaaaattgaagactttaacagaatggaaaatgtggcaaaagaagttggaccactcgtatctcaaacagacatctttgaaggtagtgggtcagtaaccagcacaacattaatagaaattttaagtgacactggagcagaaggacccacggtggcacctctccctttctccacggacatcggacatcctcaaaatcagactgtcaggtgggcagaagaaatccagactagtagaccacaaaccataactgaacaagactctaacaagaattcttcaacagcagaaattaacgaaacaacaacctcatctactgattttctggctagagcttatggttttgaaatggccaaagaatttgttacatcagcaccaaaaccatctgacttgtattatgaaccttctggagaaggatctggagaagtggatattgttgattcatttcacacttctgcaactactcaggcaaccagacaagaaagcagcaccacatttgtttctgatgggtccctggaaaaacatcctgaggtgccaagcgctaaagctgttactgctgatggattcccaacagtttcagtgatgctgcctcttcattcagagcagaacaaaagctcccctgatccaactagcacactgtcaaatacagtgtcatatgagaggtccacagacggtagtttccaagaccgtttcagggaattcgaggattccaccttaaaacctaacagaaaaaaacccactgaaaatattatcatagacctggacaaagaggacaaggatttaatattgacaattacagagagtaccatccttgaaattctacctgagctgacatcggataaaaatactatcatagatattgatcatactaaacctgtgtatgaagacattcttggaatgcaaacagatatagatacagaggtaccatcagaaccacatgacagtaatgatgaaagtaatgatgacagcactcaagttcaagagatctatgaggcagctgtcaacctttctttaactgaggaaacatttgagggctctgctgatgttctggctagctacactcaggcaacacatgatgaatcaatgacttatgaagatagaagccaactagatcacatgggctttcacttcacaactgggatccctgctcctagcacagaaacagaattagacgttttacttcccacggcaacatccctgccaattcctcgtaagtctgccacagttattccagagattgaaggaataaaagctgaagcaaaagccctggatgacatgtttgaatcaagcactttgtctgatggtcaagctattgcagaccaaagtgaaataataccaacattgggccaatttgaaaggactcaggaggagtatgaagacaaaaaacatgctggtccttcttttcagccagaattctcttcaggagctgaggaggcattagtagaccatactccctatctaagtattgctactacccaccttatggatcagagtgtaacagaggtgcctgatgtgatggaaggatccaatcccccatattacactgatacaacattagcagtttcaacatttgcgaagttgtcttctcagacaccatcatctcccctcactatctactcaggcagtgaagcctctggacacacagagatcccccagcccagtgctctgccaggaatagacgtcggctcatctgtaatgtccccacaggattcttttaaggaaattcatgtaaatattgaagcaactttcaaaccatcaagtgaggaataccttcacataactgagcctccctctttatctcctgacacaaaattagaaccttcagaagatgatggtaaacctgagttattagaagaaatggaagcttctcccacagaacttattgctgtggaaggaactgagattctccaagatttccaaaacaaaaccgatggtcaagtttctggagaagcaatcaagatgtttcccaccattaaaacacctgaggctggaactgttattacaactgccgatgaaattgaattagaaggtgctacacagtggccacactctacttctgcttctgccacctatggggtcgaggcaggtgtggtgccttggctaagtccacagacttctgagaggcccacgctttcttcttctccagaaataaaccctgaaactcaagcagctttaatcagagggcaggattccacgatagcagcatcagaacagcaagtggcagcgagaattcttgattccaatgatcaggcaacagtaaaccctgtggaatttaatactgaggttgcaacaccaccattttcccttctggagacttctaatgaaacagatttcctgattggcattaatgaagagtcagtggaaggcacggcaatctatttaccaggacctgatcgctgcaaaatgaacccgtgccttaacggaggcacctgttatcctactgaaacttcctacgtatgcacctgtgtgccaggatacagcggagaccagtgtgaacttgattttgatgaatgtcactctaatccctgtcgtaatggagccacttgtgttgatggttttaacacattcaggtgcctctgccttccaagttatgttggtgcactttgtgagcaagataccgagacatgtgactatggctggcacaaattccaagggcagtgctacaaatactttgcccatcgacgcacatgggatgcagctgaacgggaatgccgtctgcagggtgcccatctcacaagcatcctgtctcacgaagaacaaatgtttgttaatcgtgtgggccatgattatcagtggataggcctcaatgacaagatgtttgagcatgacttccgttggactgatggcagcacactgcaatacgagaattggagacccaaccagccagacagcttcttttctgctggagaagactgtgttgtaatcatttggcatgagaatggccagtggaatgatgttccctgcaattaccatctcacctatacgtgcaagaaaggaacagttgcttgcggccagccccctgttgtagaaaatgccaagacctttggaaagatgaaacctcgttatgaaatcaactccctgattagataccactgcaaagatggtttcattcaacgtcaccttccaactatccggtgcttaggaaatggaagatgggctatacctaaaattacctgcatgaacccatctgcataccaaaggacttattctatgaaatactttaaaaattcctcatcagcaaaggacaattcaataaatacatccaaacatgatcatcgttggagccggaggtggcaggagtcgaggcgctgatccctaaaatggcgaacatgtgttttcatcatttcagccaaagtcctaacttcctgtgcctttcctatcacctcgagaagtaattatcagttggtttggatttttggaccaccgttcagtcattttgggttgccgtgctcccaaaacattttaaatgaaagtattggcattcaaaaagacagcagacaaaatgaaagaaaatgagagcagaaagtaagcatttccagcctatctaatttctttagttttctatttgcctccagtgcagtccatttcctaatgtataccagcctactgtactatttaaaatgctcaatttcagcaccgatggccatgtaaataagatgatttaatgttgattttaatcctgtatataaaataaaaagtcacaatgagtttgggcatatttaatgatgattatggagccttagaggtctttaatcattggttcggctgcttttatgtagtttaggctggaaatggtttcacttgctctttgactgtcagcaagactgaagatggcttttcctggacagctagaaaacacaaaatcttgtaggtcattgcacctatctcagccataggtgcagtttgcttctacatgatgctaaaggctgcgaatgggatcctgatggaactaaggactccaatgtcgaactcttctttgctgcattcctttttcttcacttacaagaaaggcctgaatggaggacttttctgtaaccagg

SEQ ID NO: 46 - DNA, 1904 bp, Homo sapiens
agctatttcaaggcgcgcgcctcgtggtggactcaccgctagcccgcagcgctcggcttcctggtaattcttcacctcttttctcagctccctgcagcatgggtgctgggccctccttgctgctcgccgccctcctgctgcttctctccggcgacggcgccgtgcgctgcgacacacctgccaactgcacctatcttgacctgctgggcacctgggtcttccaggtgggctccagcggttcccagcgcgatgtcaactgctcggttatgggaccacaagaaaaaaaagtagtggtgtaccttcagaagctggatacagcatatgatgaccttggcaattctggccatttcaccatcatttacaaccaaggctttgagattgtgttgaatgactacaagtggtttgccttttttaagtataaagaagagggcagcaaggtgaccacttactgcaacgagacaatgactgggtgggtgcatgatgtgttgggccggaactgggcttgtttcaccggaaagaaggtgggaactgcctctgagaatgtgtatgtcaacacagcacaccttaagaattctcaggaaaagtattctaataggctctacaagtatgatcacaactttgtgaaagctatcaatgccattcagaagtcttggactgcaactacatacatggaatatgagactcttaccctgggagatatgattaggagaagtggtggccacagtcgaaaaatcccaaggcccaaacctgcaccactgactgctgaaatacagcaaaagattttgcatttgccaacatcttgggactggagaaatgttcatggtatcaattttgtcagtcctgttcgaaaccaagcatcctgtggcagctgctactcatttgcttctatgggtatgctagaagcgagaatccgtatactaaccaacaattctcagaccccaatcctaagccctcaggaggttgtgtcttgtagccagtatgctcaaggctgtgaaggcggcttcccataccttattgcaggaaagtacgcccaagattttgggctggtggaagaagcttgcttcccctacacaggcactgattctccatgcaaaatgaaggaagactgctttcgttattactcctctgagtaccactatgtaggaggtttctatggaggctgcaatgaagccctgatgaagcttgagttggtccatcatgggcccatggcagttgcttttgaagtatatgatgacttcctccactacaaaaaggggatctaccaccacactggtctaagagaccctttcaacccctttgagctgactaatcatgctgttctgcttgtgggctatggcactgactcagcctctgggatggattactggattgttaaaaacagctggggcaccggctggggtgagaatggctacttccggatccgcagaggaactgatgagtgtgcaattgagagcatagcagtggcagccacaccaattcctaaattgtagggtatgccttccagtatttcataatgatctgcatcagttgtaaaggggaattggtatattcacagactgtagactttcagcagcaatctcagaagcttacaaatagatttccatgaagatatttgtcttcagaattaaaactgcccttaattttaatatacctttcaatcggccactggccatttttttctaagtattcaattaagtgggaattttctggaagatggtcagctatgaagtaatagagtttgcttaatcatttgtaattcaaacatgctatattttttaaaatcaatgtgaaaacatagacttatttttaaattgtaccaatcacaagaaaataatggcaataattatcaaaacttttaaaatagatgctcatatttttaaaataaagttttaaaaataactgca

SEQ ID NO: 47 - DNA, 1040 bp, Homo sapiens; identical to SEQ ID NO: 2

SEQ ID NO: 48 - DNA, 1752 bp, Homo sapiens
ctgctccttctaggatctccgcctggttcggcccgcctgcctccactcctgcctccaccatgtccatcagggtgacccagaagtcctacaaggtgtccacctctggcccccgggccttcagcagccgctcctacacgagtgggcccggttcccgcatcagctcctcgagcttctcccgagtgggcagcagcaactttcgcggtggcctgggcggcggctatggtggggccagcggcatgggaggcatcaccgcagttacggtcaaccagagcctgctgagcccccttgtcctggaggtggaccccaacatccaggccgtgcgcacccaggagaaggagcagatcaagaccctcaacaacaagtttgcctccttcatagacaaggtacggttcctggagcagcagaacaagatgctggagaccaagtggagcctcctgcagcagcagaagacggctcgaagcaacatggacaacatgttcgagagctacatcaacaaccttaggcggcagctggagactctgggccaggagaagctgaagctggaggcggagcttggcaacatgcaggggctggtggaggacttcaagaacaagtatgaggatgagatcaataagcgtacagagatggagaacgaatttgtcctcatcaagaaggatgtggatgaagcttacatgaacaaggtagagctggagtctcgcctggaagggctgaccgacgagatcaacttcctcaggcagctatatgaagaggagatccgggagctgcagtcccagatctcggacacatctgtggtgctgtccatggacaacagccgctccctggacatggacagcatcattgctgaggtcaaggcacagtacgaggatattgccaaccgcagccgggctgaggctgagagcatgtaccagatcaagtatgaggagctgcagagcctggctgggaagcacggggatgacctgcggcgcacaaagactgagatctctgagatgaaccggaacatcagccggctccaggctgagattgagggcctcaaaggccagagggcttccctggaggccgccattgcagatgccgagcagcgtggagagctggccattaaggatgccaacgccaagttgtccgagctggaggccgccctgcagcgggccaagcaggacatggcgcggcagctgcgtgagtaccaggagctgatgaacgtcaagctggccctggacatcgagatcgccacctacaggaagctgctggagggcgaggagagccggctggagtctgggatgcagaacatgagtattcatacgaagaccaccagcggctatgcaggtggtctgagctcggcctatgggggcctcacaagccccggcctcagctacagcctgggctccagctttggctctggcgcgggctccagctccttcagccgcaccagctcctccagggccgtggttgtgaagaagatcgagacacgtgatgggaagctggtgtctgagtcctctgacgtcctgcccaagtgaacagctgcggcagcccctcccagcctacccctcctgcgctgccccagagcctgggaaggaggccgctatgcagggtagcactgggaacaggagacccacctgaggctcagccctagccctcagcccacctggggagtttactacctggggaccccccttgcccatgcctccagctacaaaacaattcaattgctttttttttttggtccaaaataaaacctcagctagctctgccaaaccc

SEQ ID NO: 49 - DNA, 2950 bp, Homo sapiens
gcggcccgtaggaaggtgctgtccgatcgatcgggataggagcggtccctgcgcttgctgctgggaagtggtacaatcatgtttgaaattaagaagatctgttgcatcggtgcaggctatgttggaggacccacatgtagtgtcattgctcatatgtgtcctgaaatcagggtaacggttgttgatgtcaatgaatcaagaatcaatgcgtggaattctcctacacttcctatttatgagccaggactaaaagaagtggtagaatcctgtcgaggaaaaaatctttttttttctaccaatattgatgatgccatcaaagaagctgatcttgtatttatttctgtgaatactccaacaaaaacctatggaatggggaaaggccgggcagcagatctgaagtatattgaagcttgtgctagacgcattgtgcaaaactcaaatgggtacaaaattgtgactgagaaaagcacagttccagtgcgggcagcagaaagtatccgtcgcatatttgatgcaaacacaaaacccaacttgaatttacaggtgctgtccaaccctgagtttctggcagagggaacagccatcaaggacctaaagaacccagacagagtactgattggaggggatgaaactccagagggccagagagctgtgcaggccctgtgtgctgtatatgagcactgggttcccagagaaaagatcctcaccactaatacttggtcttcagagctttccaaactggcagcaaatgcttttcttgcccagagaataagcagcattaactccataagtgctctgtgtgaagcaacaggagctgatgtagaagaggtagcaacagcgattggaatggaccagagaattggaaacaagtttctaaaagccagtgttgggtttggtgggagctgtttccaaaaggatgttctgaatttggtttatctctgtgaggctctgaatttgccagaagtagctcgttattggcagcaggtcatagacatgaatgactaccagaggaggaggtttgcttcccggatcatagatagtctgtttaatacagtaactgataagaagatagctattttgggatttgcattcaaaaaggacactggtgatacaagagaatcttctagtatatatattagcaaatatttgatggatgaaggtgcacatctacatatatatgatccaaaagtacctagggaacaaatagttgtggatctttctcatccaggtgtttcagaggatgaccaagtgtcccggctcgtgaccatttccaaggatccatatgaagcatgtgatggtgcccatgctgttgttatttgcactgagtgggacatgtttaaggaattggattatgaacgcattcataaaaaaatgctaaagccagcctttatcttcgatggacggcgtgtcctggatgggctccacaatgaactacaaaccattggcttccagattgaaacaattggcaaaaaggtgtcttcaaagagaattccatatgctccttctggtgaaattccgaagtttagtcttcaagatccacctaacaagaaacctaaagtgtagagattgccatttttatttgtgatttttttttttttttggtacttcaggatagcaaatatctatctgctattaaatggtaaatgaaccaagtgtttttttttgttttttttttgagacagagtctcactgttgcccaggctggagtgcagtggtgcaatctcggctcactgcaagctctgcttcccaggttcacgccattctcctggctcagcctcccaagtagctgggactacaggcacccgccacagtgcctgggctaattttttgtatttttagtagagacagggtttcaccatgtgagccaggatggtctcaatctcctgaccttgtgaaccacccgtctcggcctcccaaagtgctgggattacaggtgtgagccaccacgcctgggcccatgaaccaagtgtttttaaggaaacaaaactatttttttaatcatcagatttatactagctatatggatattagcatatctggtaattatgaatctagaatttttttacatatttttataatactgttagctcagttattggatgagtgaaagataatcatgttggttttaatagtgtcaatttttgtaaaataaaaattaaacttcaaactctttactttataaattgtccataggccacactttaatatcacattataaagggaaggacagtcttcattcctcctggttattggtttgtttgtcattaaagatatattttgaatccatgaaattgctatgctaaacagcctttacatgtatggtctggttaaagttcctttgttccttttgttttaataaaatgtgtcactgattttttagctcaaaatcatcactgttaatttccagtcaccccaaatatggttaaaagatttttttttttaatcatgaagagaaaattagtagcatttctttctctccccattatttattggttttcctcactaatctttttttttttagtccaaaagccaaaaatatttatcttggttttacattttaatttccattcttaattgtaatttttttctttaaataaggaaaccaatataatctcatgtataaaaacttaaatattttacaagttacatatagcatcattctaaaataagaattttttttgttttctgtctgcttttttcttatgtctcttgttgagttttatattttcagtggttatttttgcttgtgttagatcattattaaaatatatccaatgtccctttgatacttgtgctctgctgagaatgtacagtttgcattaaacatcccaggtctcatccttcaggaattttgcagttcaatgagaagagggagacaaatataaagatgaggacagaagcatctctacagatgaaaattacataaataaaacattctccatcaacaaaa

SEQ ID NO: 50 - DNA, 2704 bp, Homo sapiens
gcttagtgtaaccagcggcgtatattttttaggcgccttttcgaaaacctagtagttaatattcatttgtttaaatcttattttatttttaagctcaaactgcttaagaataccttaattccttaaagtgaaataattttttgcaaaggggtttcctcgatttggagctttttttttcttccaccgtcatttctaactcttaaaaccaactcagttccatcatggtgatgttcaagaagatcaagtcttttgaggtggtctttaacgaccctgaaaaggtgtacggcagtggcgagagggtggctggccgggtgatagtggaggtgtgtgaagttactcgtgtcaaagccgttaggatcctggcttgcggagtggctaaagtgctttggatgcagggatcccagcagtgcaaacagacttcggagtacctgcgctatgaagacacgcttcttctggaagaccagccaacaggtgagaatgagatggtgatcatgagacctggaaacaaatatgagtacaagttcggctttgagcttcctcaggggcctctgggaacatccttcaaaggaaaatatgggtgtgtagactactgggtgaaggcttttcttgaccgcccgagccagccaactcaagagacaaagaaaaactttgaagtagtggatctggtggatgtcaatacccctgatttaatggcacctgtgtctgctaaaaaagaaaagaaagtttcctgcatgttcattcctgatgggcgggtgtctgtctctgctcgaattgacagaaaaggattctgtgaaggtgatgagatttccatccatgctgactttgagaatacatgttcccgaattgtggtccccaaagctgccattgtggcccgccacacttaccttgccaatggccagaccaaggtgctgactcagaagttgtcatcagtcagaggcaatcatattatctcagggacatgcgcatcatggcgtggcaagagccttcgggttcagaagatcaggccttctatcctgggctgcaacatccttcgagttgaatattccttactgatctatgttagcgttcctggatccaagaaggtcatccttgacctgcccctggtaattggcagcagatcaggtctaagcagcagaacatccagcatggccagccgaaccagctctgagatgagttgggtagatctgaacatccctgataccccagaagctcctccctgctatatggatgtcattcctgaagatcaccgattggagagcccaacaactcctctgctagatgacatggatggctctcaagacagccctatctttatgtatgcccctgagttcaagttcatgccaccaccgacttatactgaggtggatccctgcatcctcaacaacaatgtgcagtgagcatgtggaagaaaagaagcagctttacctacttgtttctttttgtctctcttcctggacactcactttttcagagactcaacagtctcgtcaatggagtgtgggtccaccttagcctctgacttcctaatgtaggaggtggtcagcaggcaatctcctgggccttaaaggatgcggactcatcctcagccagcgcccatgttgtgatacaggggtgtttgttggatgggtttaaaaataactagaaaaactcaggcccatccattttctcagatctccttgaaaattgaggccttttcgatagtttcgggtcaggtaaaaatggcctcctggcgtaagcttttcaaggttttttggaggctttttgtaaattgtgataggaactttggaccttgaacttacgtatcatgtggagaagagccaatttaacaaactaggaagatgaaaagggaaattgtggccaaaactttgggaaaaggaggttcttaaaatcagtgtttcccctttgtgcacttgtagaaaaaaaagaaaaaccttctagagctgatttgatggacaatggagagagctttccctgtgattataaaaaaggaagctagctgctctacggtcatctttgcttagagtatactttaacctggcttttaaagcagtagtaactgccccaccaaaggtcttaaaagccatttttggagcctattgcactgtgttctcctactgcaaatattttcatatgggaggatggttttctcttcatgtaagtccttggaattgattctaaggtgatgttcttagcactttaattcctgtcaaattttttgttctccccttctgccatcttaaatgtaagctgaaactggtctactgtgtctctagggttaagccaaaagacaaaaaaaattttactacttttgagattgccccaatgtacagaattatataattctaacgcttaaatcatgtgaaagggttgctgctgtcagccttgcccactgtgacttcaaacccaaggaggaactcttgatcaagatgcccaaccctgtgatcagaacctccaaatactgccatgagaaactagagggcaggtgttcataaaagccctttgaacccccttcctgccctgtgttaggagatagggatattggcccctcactgcagctgccagcacttggtcagtcactctcagccatagcactttgttcactgtcctgtgtcagagcactgagctccacccttttctgagagttattacagccagaaagtgtgggctgaagatggttggtttcatgtgggggtattatgtaccc

SEQ ID NO: 51 - DNA, 1978 bp, Homo sapiens; identical to SEQ ID NO: 26

SEQ ID NO: 52 - DNA, 11185 bp, Homo sapiens; identical to SEQ ID NO: 45

SEQ ID NO: 53 - DNA, 1417 bp, Homo sapiens
ggtgaacagtgaacatatttacatttgatttaacagtgaaccttaattctttctggcttcacagtgaaacaagtttatgcaatcgatcaaatattttcatccctgaggttaacaattaccatcaaaatgttttgtggagactatgtgcaaggaaccatcttcccagctcccaatttcaatcccataatggatgcccaaatgctaggaggagcactccaaggatttgactgtgacaaagacatgctgatcaacattctgactcagcgctgcaatgcacaaaggatgatgattgcagaggcataccagagcatgtatggccgggacctgattggggatctgagggagcagctttcggatcacttcaaagatgtgatggctggcctcatgtacccaccaccactgtatgatgctcatgagctctggcatgccatgaagggagtaggcactgatgagaattgcctcattgaaatactagcttcaagaacaaatggagaaattttccagatgcgagaagcctactgcttgcaatacagcaataacctccaagaggacatttattcagagacctcgggacacttcagagatactctcatgaacttggtccaggggaccagagaggaaggatattcagaccctgcgatggctgctcaggatgcaatggtcctatgggaagcctgtcagcagaagacggggggacacaaaaccatgctgcaaatgatcctctgcaacaagagctaccagcagctgcggctggttttccaggaatttcaaaatatttctgggcaggatatggtagatgccattaatgaatgttatgatggatactttcaggagctgctggttgcaattgttctctgtgttcgagacaaaccagcctattttgcttatagattatatagtgcaattcatgactttggtttccataataaaactgtaatcaggattctcattgccagaagtgaaatagacctgctgaccataaggaaacgatacaaagagcgatatggaaaatccctatttcatgatatcagaaattttgcttcagggcattataagaaagcactgcttgccatctgtgctggtgatgctgaggactactaaaatgaagaggacttggagtactgtgcactcctctttctagacacttccaaatagagattttctcacaaatttgtactgttcatggcactattaacaaaactatacaatcatattttctcttctatctttgaaattattctaagccaaagaaaactatgaatgaaagtatatgatactgaatttgcctactatcctgaatttgcctactatctaatcagcaattaaataaattgtgcatgatggaataataggaaaaattggcattgggaataggattttattttaaatgtggaaccatccaacaacctaccaacca

SEQ ID NO: 54 - DNA, 1060 bp, Homo sapiens
cgcgggccgactggtgtttatccgtcactcgccgaggttccttgggtcatggtgccagcctgactgagaagaggacgctcccgggagacgaatgaggaaccacctcctcctactgttcaagtacaggggcctggtccgcaaagggaagaaaagcaaaagacgaaaatggctaaattcgtgatccgcccagccactgccgccgactgcagtgacatactgcggctgatcaaggagctggctaaatatgaatacatggaagaacaagtaatcttaactgaaaaagatctgctagaagatggttttggagagcaccccttttaccactgcctggttgcagaagtgccgaaagagcactggactccggaaggacacagcattgttggttttgccatgtactattttacctatgacccgtggattggcaagttattgtatcttgaggacttcttcgtgatgagtgattatagaggctttggcataggatcagaaattctgaagaatctaagccaggttgcaatgaggtgtcgctgcagcagcatgcacttcttggtagcagaatggaatgaaccatccatcaacttctataaaagaagaggtgcttctgatctgtccagtgaagagggttggagactgttcaagatcgacaaggagtacttgctaaaaatggcaacagaggagtgaggagtgctgctgtagatgacaacctccattctattttagaataaattcccaacttctcttgctttctatgctgtttgtagtgaaataatagaatgagcacccattccaaagctttattaccagtggcgttgttgcatgtttgaaatgaggtctgtttaaagtggcaatctcagatgcagtttggagagtcagatctttctccttgaatatctttcgataaacaacaaggtggtgtgatcttaatatatttgaaaaaaacttcattctcgtgagtcatttaaatgtgtacaatgtacacactggtacttagagtttctgtttgattcttttttaataaactactctttgatttaaaaaaaaaaaaaaaaaaaaaaaaaaa

SEQ ID NO: 55 - DNA, 10558 bp, Homo sapiens
cagtttggagctcagtcttccaccaaaggccgttcagttctcctgggctccagcctcctgcaaggactgcaagagttttcctccgcagctctgagtctccacttttttggtggagaaaggctgcaaaaagaaaaagagacgcagtgagtgggaaaagtatgcatcctattcaaacctaattgaatcgaggagcccagggacacacgccttcaggtttgctcaggggttcatatttggtgcttagacaaattcaaaatgaggaaacatcggcacttgcccttagtggccgtcttttgcctctttctctcaggctttcctacaactcatgcccagcagcagcaagcagatgtcaaaaatggtgcggctgctgatataatatttctagtggattcctcttggaccattggagaggaacatttccaacttgttcgagagtttctatatgatgttgtaaaatccttagctgtgggagaaaatgatttccattttgctctggtccagttcaacggaaacccacataccgagttcctgttaaatacgtatcgtactaaacaagaagtcctttctcatatttccaacatgtcttatattgggggaaccaatcagactggaaaaggattagaatacataatgcaaagccacctcaccaaggctgctggaagccgggccggtgacggagtccctcaggttatcgtagtgttaactgatggacactcgaaggatggccttgctctgccctcagcggaacttaagtctgctgatgttaacgtgtttgcaattggagttgaggatgcagatgaaggagcgttaaaagaaatagcaagtgaaccgctcaatatgcatatgttcaacctagagaattttacctcacttcatgacatagtaggaaacttagtgtcctgtgtgcattcatccgtgagtccagaaagggctggggacacggaaacccttaaagacatcacagcacaagactctgctgacattattttccttattgatggatcaaacaacaccggaagtgtcaatttcgcagtcattctcgacttccttgtaaatctccttgagaaactcccaattggaactcagcagatccgagtgggggtggtccagtttagcgatgagcccagaaccatgttttccttggacacctactccaccaaggcccaggttctgggtgcagtgaaagccctcgggtttgctggtggggagttggccaatatcggcctcgcccttgatttcgtggtggagaaccacttcacccgggcagggggcagccgcgtggaggaaggggttccccaggtgctggtcctcataagtgccgggccttctagtgacgagattcgctacggggtggtagcactgaagcaggctagcgtgttctcattcggccttggagcccaggccgcctccagggcagagcttcagcacatagctaccgatgacaacttggtgtttactgtcccggaattccgtagctttggggacctccaggagaaattactgccgtacattgttggcgtggcccaaaggcacattgtcttgaaaccgccaaccattgtcacacaagtcattgaagtcaacaagagagacatagtcttcctggtggatggctcatctgcactgggactggccaacttcaatgccatccgagacttcattgctaaagtcatccagaggctggaaatcggacaggatcttatccaggtggcagtggcccagtatgcagacactgtgaggcctgaattttatttcaatacccatccaacaaaaagggaagtcataaccgctgtgcggaaaatgaagcccctggacggctcggccctgtacacgggctctgctctagactttgttcgtaacaacctattcacgagttcagccggctaccgggctgccgaggggattcctaagcttttggtgctgatcacaggtggtaagtccctagatgaaatcagccagcctgcccaggagctgaagagaagcagcataatggcctttgccattgggaacaagggtgccgatcaggctgagctggaagagatcgctttcgactcctccctggtgttcatcccagctgagttccgagccgccccattgcaaggcatgctgcctggcttgctggcacctctcaggaccctctctggaacccctgaagttcactcaaacaaaagagatatcatctttcttttggatggatcagccaacgttggaaaaaccaatttcccttatgtgcgcgactttgtaatgaacctagttaacagccttgatattggaaatgacaatattcgtgttggtttagtgcaatttagtgacactcctgtaacggagttctctttaaacacataccagaccaagtcagatatccttggtcatctgaggcagctgcagctccagggaggttcgggcctgaacacaggctcagccctaagctatgtctatgccaaccacttcacggaagctggcggcagcaggatccgtgaacacgtgccgcagctcctgcttctgctcacagctgggcagtctgaggactcctatttgcaagctgccaacgccttgacacgcgcgggcatcctgactttttgtgtgggagctagccaggcgaataaggcagagcttgagcagattgcttttaacccaagcctggtgtatctcatggatgatttcagctccctgccagctttgcctcagcagctgattcagcccctaaccacatatgttagtggaggtgtggaggaagtaccactcgctcagccagagagcaagcgagacattctgttcctctttgacggctcagccaatcttgtgggccagttccctgttgtccgtgactttctctacaagattatcgatgagctcaatgtgaagccagaggggacccgaattgcggtggctcagtacagcgatgatgtcaaggtggagtcccgttttgatgagcaccagagtaagcctgagatcctgaatcttgtgaagagaatgaagatcaagacgggcaaagccctcaacctgggctacgcgctggactatgcacagaggtacatttttgtgaagtctgctggcagccggatcgaggatggagtgcttcagttcctggtgctgctggtcgcaggaaggtcatctgaccgtgtggatgggccagcaagtaacctgaagcagagtggggttgtgcctttcatcttccaagccaagaacgcagaccctgctgagttagagcagatcgtgctgtctccagcgtttatcctggctgcagagtcgcttcccaagattggagatcttcatccacagatagtgaatctcttaaaatcagtgcacaacggagcaccagcaccagtttcaggtgaaaaggacgtggtgtttctgcttgatggctctgagggcgtcaggagcggcttccctctgttgaaagagtttgtccagagagtggtggaaagcctggatgtgggccaggaccgggtccgcgtggccgtggtgcagtacagcgaccggaccaggcccgagttctacctgaattcatacatgaacaagcaggacgtcgtcaacgctgtccgccagctgaccctgctgggagggccgacccccaacaccggggccgccctggagtttgtcctgaggaacatcctggtcagctctgcgggaagcaggataacagaaggtgtgccccagctgctgatcgtcctcacggccgacaggtctggggatgatgtgcggaacccctccgtggtcgtgaagaggggtggggctgtgcccattggcattggcatcgggaacgctgacatcacagagatgcagaccatctccttcatcccggactttgccgtggccattcccacctttcgccagctggggaccgtccaacaggtcatctctgagagggtgacccagctcacccgcgaggagctgagcaggctgcagccggtgttgcagcctctaccgagcccaggtgttggtggcaagagggacgtggtctttctcatcgatgggtcccaaagtgccgggcctgagttccagtacgttcgcaccctcatagagaggctggttgactacctggacgtgggctttgacaccacccgggtggctgtcatccagttcagcgatgaccccaaggcggagttcctgctgaacgcccattccagcaaggatgaagtgcagaacgcggtgcagcggctgaggcccaagggagggcggcagatcaacgtgggcaatgccctggagtacgtgtccaggaacatcttcaagaggcccctggggagccgcattgaagagggcgtcccacagttcctggtcctcatctcgtctggaaagtctgacgatgaggtggtcgtcccggcggtggagctcaagcagtttggcgtggcccctttcacgatcgccaggaacgcagaccaggaggagctggtgaagatctcgctgagccccgaatatgtgttctcggtgagcaccttccgggagctgcccagcctggagcagaaactgctgacgcccatcacgaccctgacctcagagcagatccagaagctcttagccagcactcgctatccacctccagcagttgagagtgatgctgcagacattgtctttctgatcgacagctctgagggagttaggccagatggctttgcacatattcgagattttgttagcaggattgttcgaagactcaacatcggccccagtaaagtgagagttggggtcgtgcagttcagcaatgatgtcttcccagaattctatctgaaaacctacagatcccaggccccggtgctggacgccatacggcgcctgaggctcagaggggggtccccactgaacactggcaaggctctcgaatttgtggcaagaaacctctttgttaagtctgcggggagtcgcatagaagacggggtgccccaacacctggtcctggtcctgggtggaaaatcccaggacgatgtgtccaggttcgcccaggtgatccgttcctcgggcattgtgagtttaggggtaggagaccggaacatcgacagaacagagctgcagaccatcaccaatgaccccagactggtcttcacagtgcgagagttcagagagcttcccaacatagaagaaagaatcatgaactcgtttggaccctccgcagccactcctgcacctccaggggtggacacccctcctccttcacggccagagaagaagaaagcagacattgtgttcctgttggatggttccatcaacttcaggagggacagtttccaggaagtgcttcgttttgtgtctgaaatagtggacacagtttatgaagatggcgactccatccaagtggggcttgtccagtacaactctgaccccactgacgaattcttcctgaaggacttctctaccaagaggcagattattgacgccatcaacaaagtggtctacaaagggggaagacacgccaacactaaggtgggccttgagcacctgcgggtaaaccactttgtgcctgaggcaggcagccgcctggaccagcgggtccctcagattgcctttgtgatcacgggaggaaagtcggtggaagatgcacaggatgtgagcctggccctcacccagaggggggtcaaagtgtttgctgttggagtgaggaatatcgactcggaggaggttggaaagatagcgtccaacagcgccacagcgttccgcgtgggcaacgtccaggagctgtccgaactgagcgagcaagttttggaaactttgcatgatgcgatgcatgaaaccctttgccctggtgtaactgatgctgccaaagcttgtaatctggatgtgattctggggtttgatggttctagagaccagaatgtttttgtggcccagaagggcttcgagtccaaggtggacgccatcttgaacagaatcagccagatgcacagggtcagctgcagcggtggccgctcgcccaccgtgcgtgtgtcagtggtggccaacacgccctcgggcccggtggaggcctttgactttgacgagtaccagccagagatgctcgagaagttccggaacatgcgcagccagcacccctacgtcctcacggaggacaccctgaaggtctacctgaacaagttcagacagtcctcgccggacagcgtgaaggtggtcattcattttactgatggagcagacggagatctggctgatttacacagagcatctgagaacctccgccaagaaggagtccgtgccttgatcctggtgggccttgaacgagtggtcaacttggagcggctaatgcatctggagtttgggcgagggtttatgtatgacaggcccctgaggcttaacttgctggacttggattatgaactagcggagcagcttgacaacattgccgagaaagcttgctgtggggttccctgcaagtgctctgggcagaggggagaccgcgggcccatcggcagcatcgggccaaagggtattcctggagaagacggctaccgaggctatcctggtgatgagggtggacccggtgagcgtggtccgcctggtgtgaacggcactcaaggtttccagggctgcccgggccagagaggagtaaagggctctcggggattcccaggagagaagggcgaagtaggagaaattggactggatggtctggatggtgaagatggagacaaaggattgcctggttcttctggagagaaagggaatcctggaagaaggggtgataaaggacctcgaggagagaaaggagaaagaggagatgttgggattcgaggggacccgggtaacccaggacaagacagccaggagagaggacccaaaggagaaaccggtgacctcggccccatgggtgtcccagggagagatggagtacctggaggacctggagaaactgggaagaatggtggctttggccgaaggggaccccccggagctaagggcaacaagggcggtcctggccagccgggctttgagggagagcaggggaccagaggtgcacagggcccagctggtcctgctggtcctccagggctgataggagaacaaggcatttctggacctaggggaagcggaggtgcccgtggcgctcctggagaacgaggcagaaccggtccactgggaagaaagggtgagcccggagagccaggaccaaaaggaggaatcgggaacccgggccctcgtggggagacgggagatgacgggagagacggagttggcagtgaaggacgcagaggcaaaaaaggagaaagaggatttcctggatacccaggaccaaagggtaacccaggtgaacctgggctaaatggaacaacaggacccaaaggcatcagaggccgaaggggaaattcgggacctccagggatagttggacagaaggggagacctggctacccaggaccagctggtccaaggggcaacaggggcgactccatcgatcaatgtgccctcatccaaagcatcaaagataaatgcccttgctgttacgggcccctggagtgccccgtcttcccaacagaactagcctttgctttagacacctctgagggagtcaaccaagacactttcggccggatgcgagatgtggtcttgagtattgtgaatgtcctgaccattgctgagagcaactgcccgacgggggcccgggtggctgtggtcacctacaacaacgaggtgaccacggagatccggtttgctgactccaagaggaagtcggtcctcctggacaagattaagaaccttcaggtggctctgacatccaaacagcagagtctggagactgccatgtcgtttgtggccaggaacacatttaagcgtgtgaggaacggattcctaatgaggaaagtggctgttttcttcagcaacacacccacaagagcatccccacagctcagagaggctgtgctcaaactctcagatgcggggatcacccccttgttccttacaaggcaggaagaccggcagctcatcaacgctttgcagatcaataacacagcagtggggcatgcgcttgtcctgcctgcagggagagacctcacagacttcctggagaatgtcctcacgtgtcatgtttgcttggacatctgcaacatcgacccatcctgtggatttggcagttggaggccttccttcagggacaggagagcggcagggagtgatgtggacatcgacatggctttcatcttagacagcgctgagaccaccaccctgttccagttcaatgagatgaagaagtacatagcgtacctggtcagacaactggacatgagcccagatcccaaggcctcccagcacttcgccagagtggcagttgtgcagcacgcgccctctgagtccgtggacaatgccagcatgccacctgtgaaggtggaattctccctgactgactatggctccaaggagaagctggtggacttcctcagcaggggaatgacacagttgcagggaaccagggccttaggcagtgccattgaatacaccatagagaatgtctttgaaagtgccccaaacccacgggacctgaaaattgtggtcctgatgctgacgggcgaggtgccggagcagcagctggaggaggcccagagagtcatcctgcaggccaaatgcaagggctacttcttcgtggtcctgggcattggcaggaaggtgaacatcaaggaggtatacaccttcgccagtgagccaaacgacgtcttcttcaaattagtggacaagtccaccgagctcaacgaggagcctttgatgcgcttcgggaggctgttgccgtccttcgtcagcagtgaaaatgctttttacttgtccccagatatcaggaaacagtgtgattggttccaaggggaccaacccacaaagaaccttgtgaagtttggtcacaaacaagtaaatgttccgaataacgttacttcaagtcctacatccaacccagtgacgacaacgaagccggtgactacgacgaagccggtgaccaccacaacaaagcctgtaaccaccacaacaaagcctgtgactattataaatcagccatctgtgaagccagccgctgcaaagccggcccctgcgaaacctgtggctgccaagcctgtggccacaaagacggccactgttagacccccagtggcggtgaagccagcaacagcagcgaagcctgtagcagcaaagccagcagctgtaagaccccccgctgctgctgcaaaaccagtggcgaccaagcctgaggtccctaggccacaggcagccaaaccagctgccaccaagccagccaccactaagcccgtggttaagatgctccgtgaagtccaggtgtttgagataacagagaacagcgccaaactccactgggagaggcctgagccccccggtccttatttttatgacctcaccgtcacctcagcccatgatcagtccctggttctgaagcagaacctcacggtcacggaccgcgtcattggaggcctgctcgctgggcagacataccatgtggctgtggtctgctacctgaggtctcaggtcagagccacctaccacggaagtttcagtacaaagaaatctcagcccccacctccacagccagcaaggtcagcttctagttcaaccatcaatctaatggtgagcacagaaccattggctctcactgaaacagatatatgcaagttgccgaaagacgaaggaacttgcagggatttcatattaaaatggtactatgatccaaacaccaaaagctgtgcaagattctggtatggaggttgtggtggaaacgaaaacaaatttggatcacagaaagaatgtgaaaaggtttgcgctcctgtgctcgccaaacccggagtcatcagtgtgatgggaacctaagcgtgggtggccaacatcatatacctcttgaagaagaaggagtcagccatcgccaacttgtctctgtagaagctccgggtgtagattcccttgcactgtatcatttcatgctttgatttacactcgaactcgggagggaacatcctgctgcatgacctatcagtatggtgctaatgtgtctgtggaccctcgctctctgtctccagcagttctctcgaatactttgaatgttgtgtaacagttagccactgctggtgtttatgtgaacattcctatcaatccaaattccctctggagtttcatgttatgcctgttgcaggcaaatgtaaagtctagaaaataatgcaaatgtcacggctactctatatacttttgcttggttcattttttttcccttttagttaagcatgactttagatgggaagcctgtgtatcgtggagaaacaagagaccaactttttcattccctgcccccaatttcccagactagatttcaagctaattttctttttctgaagcctctaacaaatgatctagttcagaaggaagcaaaatcccttaatctatgtgcaccgttgggaccaatgccttaattaaagaatttaaaaaagttgtaatagagaatatttttggcattcctctcaatgttgtgtgttttttttttttgtgtgctggagggaggggatttaattttaattttaaaatgtttaggaaatttatacaaagaaactttttaataaagtatattgaaagtttaaaaaaaaaaaaaaaa

SEQ ID NO: 56 - DNA, 2133 bp, Homo sapiens
cgggagagcgcgctctgcctgccgcctgcctgcctgccactgagggttcccagcaccatgagggcctggatcttctttctcctttgcctggccgggagggccttggcagcccctcagcaagaagccctgcctgatgagacagaggtggtggaagaaactgtggcagaggtgactgaggtatctgtgggagctaatcctgtccaggtggaagtaggagaatttgatgatggtgcagaggaaaccgaagaggaggtggtggcggaaaatccctgccagaaccaccactgcaaacacggcaaggtgtgcgagctggatgagaacaacacccccatgtgcgtgtgccaggaccccaccagctgcccagcccccattggcgagtttgagaaggtgtgcagcaatgacaacaagaccttcgactcttcctgccacttctttgccacaaagtgcaccctggagggcaccaagaagggccacaagctccacctggactacatcgggccttgcaaatacatccccccttgcctggactctgagctgaccgaattccccctgcgcatgcgggactggctcaagaacgtcctggtcaccctgtatgagagggatgaggacaacaaccttctgactgagaagcagaagctgcgggtgaagaagatccatgagaatgagaagcgcctggaggcaggagaccaccccgtggagctgctggcccgggacttcgagaagaactataacatgtacatcttccctgtacactggcagttcggccagctggaccagcaccccattgacgggtacctctcccacaccgagctggctccactgcgtgctcccctcatccccatggagcattgcaccacccgctttttcgagacctgtgacctggacaatgacaagtacatcgccctggatgagtgggccggctgcttcggcatcaagcagaaggatatcgacaaggatcttgtgatctaaatccactccttccacagtaccggattctctctttaaccctccccttcgtgtttcccccaatgtttaaaatgtttggatggtttgttgttctgcctggagacaaggtgctaacatagatttaagtgaatacattaacggtgctaaaaatgaaaattctaacccaagacatgacattcttagctgtaacttaactattaaggccttttccacacgcattaatagtcccatttttctcttgccatttgtagctttgcccattgtcttattggcacatgggtggacacggatctgctgggctctgccttaaacacacattgcagcttcaacttttctctttagtgttctgtttgaaactaatacttaccgagtcagactttgtgttcatttcatttcagggtcttggctgcctgtgggcttccccaggtggcctggaggtgggcaaagggaagtaacagacacacgatgttgtcaaggatggttttgggactagaggctcagtggtgggagagatccctgcagaatccaccaaccagaacgtggtttgcctgaggctgtaactgagagaaagattctggggctgtcttatgaaaatatagacattctcacataagcccagttcatcaccatttcctcctttacctttcagtgcagtttcttttcacattaggctgttggttcaaacttttgggagcacggactgtcagttctctgggaagtggtcagcgcatcctgcagggcttctcctcctctgtcttttggagaaccagggctcttctcaggggctctagggactgccaggctgtttcagccaggaaggccaaaatcaagagtgagatgtagaaagttgtaaaatagaaaaagtggagttggtgaatcggttgttctttcctcacatttggatgattgtcataaggtttttagcatgttcctccttttcttcaccctcccctttgttcttctattaatcaagagaaacttcaaagttaatgggatggtcggatctcacaggctgagaactcgttcacctccaagcatttcatgaaaaagctgcttcttattaatcatacaaactctcaccatgatgtgaagagtttcacaaatctttcaaaataaaaagtaatgacttagaaactgaaaaaaaaaaaaaaaaaaaaaaaaaaaaaa

SEQ ID NO: 57 - DNA, 2704 bp, Homo sapiens; identical to SEQ ID NO: 50

SEQ ID NO: 58 - DNA, 799 bp, Homo sapiens
cgggcgaagcagcgcgggcagcgagatgcagcaccgaggcttcctcctcctcaccctcctcgccctgctggcgctcacctccgcggtcgccaaaaagaaagataaggtgaagaagggcggcccggggagcgagtgcgctgagtgggcctgggggccctgcacccccagcagcaaggattgcggcgtgggtttccgcgagggcacctgcggggcccagacccagcgcatccggtgcagggtgccctgcaactggaagaaggagtttggagccgactgcaagtacaagtttgagaactggggtgcgtgtgatgggggcacaggcaccaaagtccgccaaggcaccctgaagaaggcgcgctacaatgctcagtgccaggagaccatccgcgtcaccaagccctgcacccccaagaccaaagcaaaggccaaagccaagaaagggaagggaaaggactagacgccaagcctggatgccaaggagcccctggtgtcacatggggcctggccacgccctccctctcccaggcccgagatgtgacccaccagtgccttctgtctgctcgttagctttaatcaatcatgccctgccttgtccctctcactccccagccccacccctaagtgcccaaagtggggagggacaagggattctgggaagcttgagcctcccccaaagcaatgtgagtcccagagcccgcttttgttcttccccacaattccattactaagaaacacatcaaataaactgactttttccccccaataaaagctcttcttttttaatataaaaaaaaaaaaa

SEQ ID NO: 59 - DNA, 3923 bp, Homo sapiens
ggcagttagcccgcccgctcggcgcagggcgtggcttctcgtagccattaggaaacagcaaccctttcacctcagttttcttcactccggcatttgcagcagagcgaaaggtggtcgagtcctgaaggagggcctgatgtcttcatcattctcaaattcttgtaagctctgcgtcgggtgaaaccagacaaagccgcgagcccagggatgggagcacgcgggggacggcctgccggcggggacgacagcattgcgcctgggtgcagcagtgtgcgtctcggggaagggaagatattttaaggcgtgtctgagcagacggggaggcttttccaaacccaggcagcttcgtggcgtgtgcggtttcgacccggtcacacaaagcttcagcatgtcatgtgaggacggtcgggccctggaaggaacgctctcggaattggccgcggaaaccgatctgcccgttgtgtttgtgaaacagagaaagataggcggccatggtccaaccttgaaggcttatcaggagggcagacttcaaaagctactaaaaatgaacggccctgaagatcttcccaagtcctatgactatgaccttatcatcattggaggtggctcaggaggtctggcagctgctaaggaggcagcccaatatggcaagaaggtgatggtcctggactttgtcactcccacccctcttggaactagatggggtctcggaggaacatgtgtgaatgtgggttgcatacctaaaaaactgatgcatcaagcagctttgttaggacaagccctgcaagactctcgaaattatggatggaaagtcgaggagacagttaagcatgattgggacagaatgatagaagctgtacagaatcacattggctctttgaattggggctaccgagtagctctgcgggagaaaaaagtcgtctatgagaatgcttatgggcaatttattggtcctcacaggattaaggcaacaaataataaaggcaaagaaaaaatttattcagcagagagatttctcattgccactggtgaaagaccacgttacttgggcatccctggtgacaaagaatactgcatcagcagtgatgatcttttctccttgccttactgcccgggtaagaccctggttgttggagcatcctatgtcgctttggagtgcgctggatttcttgctggtattggtttagacgtcactgttatggttaggtccattcttcttagaggatttgaccaggacatggccaacaaaattggtgaacacatggaagaacatggcatcaagtttataagacagttcgtaccaattaaagttgaacaaattgaagcagggacaccaggccgactcagagtagtagctcagtccaccaatagtgaggaaatcattgaaggagaatataatacggtgatgctggcaataggaagagatgcttgcacaagaaaaattggcttagaaaccgtaggggtgaagataaatgaaaagactggaaaaatacctgtcacagatgaagaacagaccaatgtgccttacatctatgccattggcgatatattggaggataaggtggagctcaccccagttgcaatccaggcaggaagattgctggctcagaggctctatgcaggttccactgtcaagtgtgactatgaaaatgttccaaccactgtatttactcctttggaatatggtgcttgtggcctttctgaggagaaagctgtggagaagtttggggaagaaaatattgaggtttaccatagttacttttggccattggaatggacgattccgtcaagagataacaacaaatgttatgcaaaaataatctgtaatactaaagacaatgaacgtgttgtgggctttcacgtactgggtccaaatgctggagaagttacacaaggctttgcagctgcgctcaaatgtggactgaccaaaaagcagctggacagcacaattggaatccaccctgtctgtgcagaggtattcacaacattgtctgtgaccaagcgctctggggcaagcatcctccaggctggctgctgaggttaagccccagtgtggatgctgttgccaagactgcaaaccactggctcgtttccgtgcccaaatccaaggcgaagttttctagagggttcttgggctcttggcacctgcgtgtcctgtgcttaccaccgcccaaggcccccttggatctcttggataggagttggtgaatagaaggcaggcagcatcacactggggtcactgacagacttgaagctgacatttggcagggcatcgaagggatgcatccatgaagtcaccagtctcaagcccatgtggtaggcggtgatggaacaactgtcaaatcagttttagcatgacctttccttgtggattttcttattctcgttgtcaagttttctagggttgaatttttttcttttttctccatggtgttaatgatattagagatgaaaaacgttagcagttgatttttgtccaaaagcaagtcatggctagagtatccatgcaaggtgtcttgttgcatggaagggatagtttggctcccttggaggctatgtaggcttgtcccgggaaagagaactgtcctgcagctgaaatggactgttctttactgacctgctcagcagtttcttctctcatatattcccaaaacaagtacatctgcgatcaactctagccaaatttgcccctgtgtgctacatgatggatgattattattttaaggtctgtttaggaagggaaatggctacttggccagccattgcctggcatttggtagtatagtatgattctcaccattatttgtcatggaggcagacatacaccagaaatgggggagaaacagtacatatctttctgtctttagtttattgtgtgctggtctaagcaagctgagatcatttgcaatggaaaacacgtaacttgtttaaaagtttttctggtagctttagctttatgctaaaaaaaataatgacattgggtatctatttctttctaagactacattagtaggaaaataagtcttttcatgcttatgatttagctgttttgtggtaattgctttttaaaggaagttattaatatcataagttattattaatattttgaacacaggtggatgtgaaggattttcatttaaaaaccaagtggttttgactttttctgttgaatgaacaactgtgccttgtggaatttttgcagaagtgtttatgctttgttagcatttcaacttgcattattataaagaggtattaatgcctcagttatgtgtttgtcaatgtactggctgaggattctatctcagctgtcttttctaactgtgtaggttgagttttgaacacgtgcttgtggacatcaggcctcctgccagcagttcttgaagcttctttttcattcctgctactctacctgtatttctcagttgcagcactgagtggtcaaaatacatttctgggccacctcagggaacccatgcatctgcctggcatttaggcagcagagcccctgaccgtcccccacagggctctgcctcacgtcctcatctcatttggctgtgtaaagaaatgggaaaagggaaaaggagagagcaattgaggcagttgaccatattcagttttatttatttatttttaatttgtttttttctccaagtccaccagtctctgaaattagaacagtaggcggtatgagataatcaggcctaatcatgttgtgattctcttttcttagtggagtggaatgttctatccccacaagaaggattatatcttatagacttgtcttgttcagattctgtatttacccattttattgaaacatatactaagttccatgtatttttgttacaaatcttctgaaaaaaaacaaaacaatgtgaaacattaaaattaaaaggcattaataataaaaaaaaaaaaaaaaa

SEQ ID NO: 60 - DNA, 1111 bp, Homo sapiens
ctgggtctctgcgccgcagccgcccgcccgcccgctcagcgcccggccccgggatgacggcggcccaggccgcgggtgaggaggcgccaccaggcgtgcggtccgtcaaggtggtcctggtgggcgacggcggctgcgggaagacgtcgctgctgatggtcttcgccgatggggccttccccgagagctacacccccacggtgtttgagcggtacatggtcaacctgcaagtgaaaggcaaacctgtgcacctccacatctgggacacagcagggcaagatgactatgaccgcctgcggcccctgttctaccctgacgccagcgtcctgctgctttgcttcgatgtcaccagcccgaacagctttgacaacatctttaaccggtggtacccagaagtgaatcatttctgcaagaaggtacccatcatcgtcgtgggctgcaagactgacctgcgcaaggacaaatcactggtgaacaagctccgaagaaacggattggagcctgtgacctaccacaggggccaggagatggcgaggtccgtgggcgcggtggcctacctcgagtgctcggctcggctccatgacaacgtccacgccgtcttccaggaggccgccgaggtggccctcagcagccgcggtcgcaacttctggcggcggattacccagggcttttgcgtggtgacctgagcggctcggggcgtcccagcgacgcgggaaggggcagggcgctgacctgctgctgagctggctgggctggacccggtccctaggctgtgaccgccgaactccactgcaacagacgggcgccaccaaagccaggccctgaggcctgggagtcctggactgagaaagggggttcctgggcccacctgctctgtgtagggctcgtcctgcggtgcccgagaatcactcgctaacccctatgcccggtcccggaccgacatcctggagccgcctgtgcagcctgatgccccctcgtggctgctcccagggctgcacctgccaggacctaatgttcttaggtccctctggccagaacccacacccggccccttcccacctgtcatactggtaactgtaacaagaaaaacgacatcaaaaaaaaaaaaaaa

SEQ ID NO: 61 - DNA, 839 bp, Homo sapiens; identical to SEQ ID NO: 6

SEQ ID NO: 62 - DNA, 1022 bp, Homo sapiens
cacccccacctgccagagccttgatccctccctaggccctgcctaaccttgagttggccccaatccctcttggctgcagaagtccctttcacccccaatgagaggaggggcaggaccagatcttttgagagctgagggttgagggcattgagcaacacacagatttgtcgcctctgtccccgaagacacctgcaccctccatgcggagccaagatggggaatggaactgaggaagattataactttgtcttcaaggtggtgctgatcggcgaatcaggtgtggggaagaccaatctactctcccgattcacgcgcaatgagttcagccacgacagccgcaccaccatcggggttgagttctccacccgcactgtgatgttgggcaccgctgctgtcaaggctcagatctgggacacagctggcctggagcggtaccgagccatcacctcggcgtactatcgtggtgcagtgggggccctcctggtgtttgacctaaccaagcaccagacctatgctgtggtggagcgatggctgaaggagctctatgaccatgctgaagccacgatcgtcgtcatgctcgtgggtaacaaaagtgacctcagccaggcccgggaagtgcccactgaggaggcccgaatgttcgctgaaaacaatggactgctcttcctggagacctcagccctggactctaccaatgttgagctagcctttgagactgtcctgaaagaaatctttgcgaaggtgtccaagcagagacagaacagcatccggaccaatgccatcactctgggcagtgccaggctggacaggagcctggcctggggagaagagggcctgttgcatcagcctctgaccttggccagcaccacctgcccccactggctttttgtgccccttgtccccacttcagccccaggacctttccttgccctttggttccagatatcagactgttccctgttcacagcaccctcagggtcttaaggtcttcatgccctatcacaaatacctcttttatctgt

SEQ ID NO: 63 - DNA, 2432 bp, Homo sapiens
actcagtttcaccagaaaccagggggagaaggcggccgagccccagctctccgagcaccgggtcggaagccgcgacccgagccgcgcaggaagctgggaccggaacctcggcggacccggccccacccaactcacctgcgcaggtcaccagcaccctcggaacccagaggcccgcgctctgaaggtgacccccctggggaggaaggcgatggcccctgcgaggacgatggcccgcgcccgcctcgccccggccggcatccctgccgtcgccttgtggcttctgtgcacgctcggcctccagggcacccaggccgggccaccgcccgcgccccctgggctgcccgcgggagccgactgcctgaacagctttaccgccggggtgcctggcttcgtgctggacaccaacgcctcggtcagcaacggagctaccttcctggagtcccccaccgtgcgccggggctgggactgcgtgcgcgcctgctgcaccacccagaactgcaacttggcgctagtggagctgcagcccgaccgcggggaggacgccatcgccgcctgcttcctcatcaactgcctctacgagcagaacttcgtgtgcaagttcgcgcccagggagggcttcatcaactacctcacgagggaagtgtaccgctcctaccgccagctgcggacccagggctttggagggtctgggatccccaaggcctgggcaggcatagacttgaaggtacaaccccaggaacccctggtgctgaaggatgtggaaaacacagattggcgcctactgcggggtgacacggatgtcagggtagagaggaaagacccaaaccaggtggaactgtggggactcaaggaaggcacctacctgttccagctgacagtgactagctcagaccacccagaggacacggccaacgtcacagtcactgtgctgtccaccaagcagacagaagactactgcctcgcatccaacaaggtgggtcgctgccggggctctttcccacgctggtactatgaccccacggagcagatctgcaagagtttcgtttatggaggctgcttgggcaacaagaacaactaccttcgggaagaagagtgcattctagcctgtcggggtgtgcaaggcccctccatggaaaggcgccatccagtgtgctctggcacctgtcagcccacccagttccgctgcagcaatggctgctgcatcgacagtttcctggagtgtgacgacacccccaactgccccgacgcctccgacgaggctgcctgtgaaaaatacacgagtggctttgacgagctccagcgcatccatttccccagtgacaaagggcactgcgtggacctgccagacacaggactctgcaaggagagcatcccgcgctggtactacaaccccttcagcgaacactgcgcccgctttacctatggtggttgttatggcaacaagaacaactttgaggaagagcagcagtgcctcgagtcttgtcgcggcatctccaagaaggatgtgtttggcctgaggcgggaaatccccattcccagcacaggctctgtggagatggctgtcgcagtgttcctggtcatctgcattgtggtggtggtagccatcttgggttactgcttcttcaagaaccagagaaaggacttccacggacaccaccaccacccaccacccacccctgccagctccactgtctccactaccgaggacacggagcacctggtctataaccacaccacccggcccctctgagcctgggtctcaccggctctcacctggccctgcttcctgcttgccaaggcagaggcctgggctgggaaaaactttggaaccagactcttgcctgtttcccaggcccactgtgcctcagagaccagggctccagcccctcttggagaagtctcagctaagctcacgtcctgagaaagctcaaaggtttggaaggagcagaaaacccttgggccagaagtaccagactagatggacctgcctgcataggagtttggaggaagttggagttttgtttcctctgttcaaagctgcctgtccctaccccatggtgctaggaagaggagtggggtggtgtcagaccctggaggccccaaccctgtcctcccgagctcctcttccatgctgtgcgcccagggctgggaggaaggacttccctgtgtagtttgtgctgtaaagagttgctttttgtttatttaatgctgtggcatgggtgaagaggaggggaagaggcctgtttggcctctctatcctctcttcctcttcccccaagattgagctctctgcccttgatcagccccaccctggcctagaccagcagacagagccaggagaagctcagctgcattccgcagcccccacccccaaggttctccaacatcacagcccagcccacccactgggtaataaaagtggtttgtggaaa

SEQ ID NO: 64 - DNA, 1544 bp, Homo sapiens
  misc_feature (1358)..(1358): n is a, c, g, or t
gcacgagttgggaggtgtagcgcggctctgaacgcgctgagggccgttgagtgtcgcaggcggcgagggcgcgagtgaggagcagacccaggcatcgcgcgccgagaaggccgggcgtccccacactgaaggtccggaaaggcgacttccgggggctttggcacctggcggaccctcccggagcgtcggcacctgaacgcgaggcgctccattgcgcgtgcgcgttgaggggcttcccgcacctgatcgcgagaccccaacggctggtggcgtcgcctgcgcgtctcggctgagctggccatggcgcagctgtgcgggctgaggcggagccgggcgtttctcgccctgctgggatcgctgctcctctctggggtcctggcggccgaccgagaacgcagcatccacgacttctgcctggtgtcgaaggtggtgggcagatgccgggcctccatgcctaggtggtggtacaatgtcactgacggatcctgccagctgtttgtgtatgggggctgtgacggaaacagcaataattacctgaccaaggaggagtgcctcaagaaatgtgccactgtcacagagaatgccacgggtgacctggccaccagcaggaatgcagcggattcctctgtcccaagtgctcccagaaggcaggattctgaagaccactccagcgatatgttcaactatgaagaatactgcaccgccaacgcagtcactgggccttgccgtgcatccttcccacgctggtactttgacgtggagaggaactcctgcaataacttcatctatggaggctgccggggcaataagaacagctaccgctctgaggaggcctgcatgctccgctgcttccgccagcaggagaatcctcccctgccccttggctcaaaggtggtggttctggcggggctgttcgtgatggtgttgatcctcttcctgggagcctccatggtctacctgatccgggtggcacggaggaaccaggagcgtgccctgcgcaccgtctggagctccggagatgacaaggagcagctggtgaagaacacatatgtcctgtgaccgccctgtcgccaagaggactggggaagggaggggagactatgtgtgagctttttttaaatagagggattgactcggatttgagtgatcattagggctgaggtctgtttctctgggaggtaggacggctgcttcctggtctggcagggatgggtttgctttggaaatcctctaggaggctcctcctcgcatggcctgcagtctggcagcagccccgagttgtttcctcgctgatcgatttctttcctccaggtagagttttctttgcttatgttgaattccattgcctccttttctcnatcacagaagtgatgttggaatcgtttcttttgtttgtctgatttatggtttttttaagtataaacaaaagttttttattagcattctgaaagaaggaaagtaaaatgtacaagtttaataaaaaggggccttcccctttagaataaatttccagcatgttgctttcaaaaaaaaaaaaaaaaaaa

SEQ ID NO: 65 - DNA, 817 bp, Homo sapiens
gaaggaggcccagacagtgagggcaggagggagagaagagacgcagaaggagagcgagcgagagagaaagggttctggattggaggggagagcaagggagggaggaaggcggtgagagaggcgggggcctcgggagggtgaaaggagggaggagaagggcggggcacggaggcccgagcgagggacaagactccgactccagctctgacttttttcgcggctctcggcttccactgcagccatgtcactcctcttgctggtggtctcagcccttcacatcctcattcttatactgcttttcgtggccactttggacaagtcctggtggactctccctgggaaagagtccctgaatctctggtacgactgcacgtggaacaacgacaccaaaacatgggcctgcagtaatgtcagcgagaatggctggctgaaggcggtgcaggtcctcatggtgctctccctcattctctgctgtctctccttcatcctgttcatgttccagctctacaccatgcgacgaggaggtctcttctatgccaccggcctctgccagctttgcaccagcgtggcggtgtttactggcgccttgatctatgccattcacgccgaggagatcctggagaagcacccgcgagggggcagcttcggatactgcttcgccctggcctgggtggccttccccctcgccctggtcagcggcatcatctacatccacctacggaagcgggagtgagcgccccgcctcgctcggctgcccccgccccttcccggcccccctcgccgcgcgtcctccaaaaaaataaaactttaacggcgg

SEQ ID NO: 66 - DNA, 6702 bp, Homo sapiens
ccccgactagcccgacagtccccgactagcccgacagccccagcaggatctgcatcgtcatcgagccggcccagcttctgaagggagatgtcatggtgaaatgctaccacaagaaataccgctcggccacccgtgacgtcattttccgcctgcagtttcacactggggctgtgcagggctacgggctggtgtttgggaaggaggatctggacaatgccagcaaagatgaccgttttcctgactatgggaaggttgaattagtcttctctgccacgcctgagaagattcaagggtccgaacacttgtacaacgaccacggtgtgattgtggactacaacacaacagacccactgatacgctgggactcgtacgagaacctcagtgcagatggagaagtgctacacacgcagggccctgtcgatggcagcctttacgcgaaggtgaggaagaaaagctcctcggatcctggcatcccaggtggcccccaggcaatcccggccaccaacagcccagaccacagtgaccacaccttgtctgtcagcagtgactccggccactctacagcctctgccaggacggataagacggaagagcgcctggccccaggaaccaggaggggcctgagtgcccaggagaaggcagagttggaccagctgctcagtggctttggcctggaagatcctggaagctccctcaaggaaatgactgatgctcgaagcaagtacagtgggacccgccacgtggtgccagcccaggttcacgtgaatggagacgctgctctgaaggatcgggagacagacattctggatgacgagatgccccaccacgacctgcacagtgtggacagccttgggaccctgtcctcctcggaagggcctcagtcggcccacctgggtcccttcacctgccacaagagcagccagaactcactcctatctgacggttttggcagcaacgttggtgaagatccgcagggcaccctcgttccggacctgggccttggcatggacggcccctatgagcgggagcggacttttgggagtcgagagcccaagcagccccagcccctgctgagaaagccctcagtgtccgcccagatgcaggcctatgggcagagcagctactccacacagacctgggtgcgccagcagcagatggttgtagctcaccagtatagcttcgccccagatggggaggcccggctggtgagccgctgccctgcagacaatcctggcctcgtccaggcccagcccagagtgccactcacccccacccgagggaccagcagtagggtggctgtccagaggggtgtaggcagtgggccacatccccctgacacacagcagccctctcccagcaaagcgttcaaacccaggtttccaggagaccaggttgtgaatggagccggcccagagctgagcacaggcccctccccaggctcgcccaccctggacatcgaccagtccatcgagcagctcaacaggctgatcctggagctggatcccaccttcgagcccatccctacccacatgaacgccctcggtagccaggccaatggctctgtgtctccagacagcgtgggaggtgggctccgggcaagcagcaggctgcctgacacaggagagggccccagcagggccaccgggcggcaaggctcctctgctgaacagcccctgggcgggagactcaggaagctgagcctggggcagtacgacaacgatgctggggggcagctgcccttctccaaatgtgcatggggaaaggctggtgtggactatgccccaaacctgccgccattcccctcaccagcggacgtcaaagagacgatgacccctggctatccccaggacctcgatattatcgatggcagaattttaagtagcaaggagtccatgtgttcaactccagcatttcctgtgtctccagagacaccgtatgtgaaaacagcgctgcgccatcctccgttcagcccacctgagcccccgctgagcagcccagccagtcagcacaaaggaggacgtgaaccacgaagctgccctgagacgctcactcacgctgtggggatgtcagagagccccatcggacccaaatccacgatgctccgggctgatgcgtcctcgacgccctcctttcagcaggcttttgcttcttcctgcaccatttccagcaacggccctgggcagaggagagagagctcctcttctgcagaacgccagtgggtggagagcagccccaagcccatggtttccctgctggggagcggccggcccaccggaagtcccctcagcgctgagttctccggtaccaggaaggactccccagtgctgtcctgcttcccgccgtcagagctccaggctcctttccacagccatgagctgtccctagcagagccaccggactccctggcgcctcccagcagccaggccttcctgggcttcggcaccgccccagtgggaagtggccttccgcccgaggaggacctgggggccttgctggccaattctcatggagcgtcaccgacccccagcatcccgctgacagcgacaggggctgccgacaatggcttcctgtcccacaactttctcacggtggcgcctggacacagcagccaccacagtccaggcctgcagggccagggtgtgaccctgcccgggcagccacccctccctgagaagaagcgggcctcggagggggatcgttctttgggctcagtctctccctcctccagtggcttctccagcccgcacagcgggagcaccatcagtatccccttcccaaatgtccttcccgacttttccaaggcttcagaagcggcctcacctctgccagatagtccaggtgataaacttgtgatcgtgaaatttgttcaagacacttccaagttctggtacaaggcggatatttcaagagaacaagccatcgccatgttgaaggacaaggagccgggctcattcattgttcgagacagccattccttccgaggggcctatggcctggccatgaaggtggccacgcccccaccttcagtcctgcagctgaacaagaaagctggagatttggccaatgaactcgtccggcactttttgatcgagtgtaccccgaagggagtgcggttgaaagggtgctcgaatgaaccatatttcgggagcctgacggccttggtgtgccagcattccatcacgcccttggccttgccgtgcaagctgcttatcccagagagagatccattggaggaaatagcagaaagttctccccagacggcagccaattcagcagctgagctgttgaagcagggggcagcctgcaacgtgtggtacttgaactctgtggagatggagtccctcaccggccaccaggcgatccagaaggccctgagcatcaccctggtccaggagcctccacctgtgtccacagttgtgcacttcaaggtgtcagcccagggcatcaccctgacagacaatcagaggaagctcttcttccggaggcattaccccgtgaacagtgtgattttctgtgccttggacccacaagacaggaagtggatcaaagatggcccttcctcaaaagtctttggatttgtggcccggaagcagggcagtgccacggataatgtgtgccacctgtttgcagagcatgaccctgagcagcctgccagtgccattgtcaacttcgtatcaaaggtcatgattggttccccaaagaaggtctgagaactcccctccctccctggacccaccgatgcctctcgaagccctggagacagccgttgggtgagggtggggcccccactttttaccaaactagtaaacctgacattccaggcccatgaggggaaagaggatcttccagctctgcaaaaacaagaacaaacaacatcaccgtgaattggcctttcctgaaagtgacttatctgacacatctctgtagccacatgctttttgggtagaagaagctgggcatgggtgcaccccaccccctagggtccccatgggaaagggacatgcaaggaaacagcacagaacacgaggtggtccccatgtccctggcacactagcattccgggggatgaggaatccccagcccttgaggcagaggtgccgagtgactgccatgcttcgcccgtccgcatgggcgcttctgtccagctgcacccgaggccgggggtttccctcacctcggtcttcccaagatggagatgctaacgaaactgagaagggggcgtatgtttgacgaaggtttgtgcaagtcaggcccttctggaacacagcagggcctacaacgaggggcctttgcgatgggctgtgaggatgggggtggtgggaagaattggccacgttagagaccccatgccaccccaccatggtgagtgctctgtgcctcctgctcacctgtggtgagctgggcgagctgggcgagctgggcgagctgggctggggagagcctgtgaggaccgagaggagaaatgagaagaaggaacaaaaatattatttctatgtaatttatattttacttatgccaaattatttatgataatttgccattgctatactgtaccagtgtcaaatgctgcagcctgccaagctgtgattttgtgaggcttgtccctatgtaggatgcaccgcaggcccctggccactgaaagagtgtgcagtggactgtgggtctcccatatgcggtgccgcccaaaggtggctttgcctcaagcaacctaccctgatgttttactcattggaatgtttttccccgattgtggatgacttcttttctgatggagagagtccaggagggatggaaaactcctggatttaagctcagcatcccccacatgggcttttcgatcatcttcaggcctgaagctgcacgacctgaagttcgcctgcatttatcagccctctttgtgctgctccttgccaccttggggttcctgctggggaccatgtgtggttgtggcatgtgtgagcagaagggaggatgaggaaaaagagaagaaaccccggtactgacaagctgtttttgagtgccactgtttgccatcatctaagccactgaatcaagtgtatttcaggcttatttcaacattccaatgccctggttttcctgcttgaatctgttcgtggtcaaaggtttgggggaatttgtgaccctggaacatccccagagtgaaagatggagctgggccacatcagaataaggccttggccccatcctctcacagcctaggtgctctgcaggcatgctgactgtcctgattgcgatccagcccgaaattccctcctctgctttcaaaagtcaaatcccccattcttaggccacactggtgtcacaagctcctgtcagggagctggggtttgggaatgtgctttgtgaactctgctttaaagtgaggggccgaggaaaacttagaaacaggcagagttggaagcagccaaatcacagtgggtgttgtgtgtgtgtgcgtgtgtgcatgcgtgcgtgtatgcgtgtgtgaaagcaggtggaccattccactttttagctcctattgatgcaccaaaccaagtgcctcatttctgtgccaaatgtttgccttggtcgttgtggacctccttctctaacttgcggtggcatgactgtcaggaggtgctggcattttcagcagatcctcatgtgttgaccctgatgtctttagcagaggcctctagcatctcggtttttcatccactgcaggaatgtggccacagggagcagaggtttgtactttccccaagaggtcctcatcctgagacggtctctacccatgtttaacccaaagagtgcaggccaggttccttatccttctgatgaaggatgagagagctcatttagaagtcagagcaaactagggtctcagtattgagaaacgcagcctgccagggaatcacagagacatcggggtgcccgcgatggccctcatgaagccatgcctcgacggcattcaggaagccctgcaaacgtgctttttgaactcattggccaggtgtgatttttacacaaggtaaacgtggtcaagggcatcggggaatttgctccaagcagatagctccctctgaggaaccaaaggaagcaagtttccacgatttctgaagagctggtataggaagtttctttcttccttttgtgttacatgtgcattaaacagaacaagctgtgtgtcatcacagattgtactgtgggctcagaaaccgtgagagagcccccaccgtggacaccggctctagggccacaggaaaaggaacgtttccaggcattttgtctccagggctcccgctggacaggcacgtactgccctggggagtaaatgcggagagttcacgaactgtgcccaacgcatgttatagccagggtcctactaactactcagtaaaagaacgtattgttgtattcctccagtgttaagctatagccatgttaaaagtcactgtgcatttattctcagcatcaaataccttgtaacgtcttctctgccttgttagtgcatatttttacttttctgatactgtaaagaatatatccagtatgtaaatgaatgttctataaatcttttgtatagtcattttctctgctccttaaatatcatctctattcagagtataataaaattatgaacttggtaaaaaaaaaaaaaaaaaaaaaaaaaaaaaaaaaaaaaaaaaaaaaaaaaaaaaaaaaaaaaaaaaaaaaaaa

SEQ ID NO: 67 - DNA, 3958 bp, Homo sapiens
gtgctgcctcgtctgaggggacaggaggatcaccctcttcgtcgcttcggccagtgtgtcgggctgggccctgacaagccacctgaggagaggctcggagccgggcccggaccccggcgattgccgcccgcttctctctagtctcacgaggggtttcccgcctcgcacccccacctctggacttgcctttccttctcttctccgcgtgtggagggagccagcgcttaggccggagcgagcctgggggccgcccgccgtgaagacatcgcggggaccgattcaccatggagggcgccggcggcgcgaacgacaagaaaaagataagttctgaacgtcgaaaagaaaagtctcgagatgcagccagatctcggcgaagtaaagaatctgaagttttttatgagcttgctcatcagttgccacttccacataatgtgagttcgcatcttgataaggcctctgtgatgaggcttaccatcagctatttgcgtgtgaggaaacttctggatgctggtgatttggatattgaagatgacatgaaagcacagatgaattgcttttatttgaaagccttggatggttttgttatggttctcacagatgatggtgacatgatttacatttctgataatgtgaacaaatacatgggattaactcagtttgaactaactggacacagtgtgtttgattttactcatccatgtgaccatgaggaaatgagagaaatgcttacacacagaaatggccttgtgaaaaagggtaaagaacaaaacacacagcgaagcttttttctcagaatgaagtgtaccctaactagccgaggaagaactatgaacataaagtctgcaacatggaaggtattgcactgcacaggccacattcacgtatatgataccaacagtaaccaacctcagtgtgggtataagaaaccacctatgacctgcttggtgctgatttgtgaacccattcctcacccatcaaatattgaaattcctttagatagcaagactttcctcagtcgacacagcctggatatgaaattttcttattgtgatgaaagaattaccgaattgatgggatatgagccagaagaacttttaggccgctcaatttatgaatattatcatgctttggactctgatcatctgaccaaaactcatcatgatatgtttactaaaggacaagtcaccacaggacagtacaggatgcttgccaaaagaggtggatatgtctgggttgaaactcaagcaactgtcatatataacaccaagaattctcaaccacagtgcattgtatgtgtgaattacgttgtgagtggtattattcagcacgacttgattttctcccttcaacaaacagaatgtgtccttaaaccggttgaatcttcagatatgaaaatgactcagctattcaccaaagttgaatcagaagatacaagtagcctctttgacaaacttaagaaggaacctgatgctttaactttgctggccccagccgctggagacacaatcatatctttagattttggcagcaacgacacagaaactgatgaccagcaacttgaggaagtaccattatataatgatgtaatgctcccctcacccaacgaaaaattacagaatataaatttggcaatgtctccattacccaccgctgaaacgccaaagccacttcgaagtagtgctgaccctgcactcaatcaagaagttgcattaaaattagaaccaaatccagagtcactggaactttcttttaccatgccccagattcaggatcagacacctagtccttccgatggaagcactagacaaagttcacctgagcctaatagtcccagtgaatattgtttttatgtggatagtgatatggtcaatgaattcaagttggaattggtagaaaaactttttgctgaagacacagaagcaaagaacccattttctactcaggacacagatttagacttggagatgttagctccctatatcccaatggatgatgacttccagttacgttccttcgatcagttgtcaccattagaaagcagttccgcaagccctgaaagcgcaagtcctcaaagcacagttacagtattccagcagactcaaatacaagaacctactgctaatgccaccactaccactgccaccactgatgaattaaaaacagtgacaaaagaccgtatggaagacattaaaatattgattgcatctccatctcctacccacatacataaagaaactactagtgccacatcatcaccatatagagatactcaaagtcggacagcctcaccaaacagagcaggaaaaggagtcatagaacagacagaaaaatctcatccaagaagccctaacgtgttatctgtcgctttgagtcaaagaactacagttcctgaggaagaactaaatccaaagatactagctttgcagaatgctcagagaaagcgaaaaatggaacatgatggttcactttttcaagcagtaggaattggaacattattacagcagccagacgatcatgcagctactacatcactttcttggaaacgtgtaaaaggatgcaaatctagtgaacagaatggaatggagcaaaagacaattattttaataccctctgatttagcatgtagactgctggggcaatcaatggatgaaagtggattaccacagctgaccagttatgattgtgaagttaatgctcctatacaaggcagcagaaacctactgcagggtgaagaattactcagagctttggatcaagttaactgagctttttcttaatttcattcctttttttggacactggtggctcactacctaaagcagtctatttatattttctacatctaattttagaagcctggctacaatactgcacaaacttggttagttcaatttttgatcccctttctacttaatttacattaatgctcttttttagtatgttctttaatgctggatcacagacagctcattttctcagttttttggtatttaaaccattgcattgcagtagcatcattttaaaaaatgcacctttttatttatttatttttggctagggagtttatccctttttcgaattatttttaagaagatgccaatataatttttgtaagaaggcagtaacctttcatcatgatcataggcagttgaaaaatttttacaccttttttttcacattttacataaataataatgctttgccagcagtacgtggtagccacaattgcacaatatattttcttaaaaaataccagcagttactcatggaatatattctgcgtttataaaactagtttttaagaagaaattttttttggcctatgaaattgttaaacctggaacatgacattgttaatcatataataatgattcttaaatgctgtatggtttattatttaaatgggtaaagccatttacataatatagaaagatatgcatatatctagaaggtatgtggcatttatttggataaaattctcaattcagagaaatcatctgatgtttctatagtcactttgccagctcaaaagaaaacaataccctatgtagttgtggaagtttatgctaatattgtgtaactgatattaaacctaaatgttctgcctaccctgttggtataaagatattttgagcagactgtaaacaagaaaaaaaaaatcatgcattcttagcaaaattgcctagtatgttaatttgctcaaaatacaatgtttgattttatgcactttgtcgctattaacatcctttttttcatgtagatttcaataattgagtaattttagaagcattattttaggaatatatagttgtcacagtaaatatcttgttttttctatgtacattgtacaaatttttcattccttttgctctttgtggttggatctaacactaactgtattgttttgttacatcaaataaacatcttctgtggaccaggaaaaaaaaaaaaaaaaaaa

SEQ ID NO: 68 - DNA, 3269 bp, Homo sapiens
cgcgccagggcgagggcaccgccgccggtcgggcgcgctgggcctgcccggaatcccgccgcctgcgccccgcgccccgcgccctgcgggccatgggagccggccgccggcagggacgacgcctgtgagacccgcgagcggcctcggggaccatggggagcgatcgggcccgcaagggcggagggggcccgaaggacttcggcgcgggactcaagtacaactcccggcacgagaaagtgaatggcttggaggaaggcgtggagttcctgccagtcaacaacgtcaagaaggtggaaaagcatggcccggggcgctgggtggtgctggcagccgtgctgatcggcctcctcttggtcttgctggggatcggcttcctggtgtggcatttgcagtaccgggacgtgcgtgtccagaaggtcttcaatggctacatgaggatcacaaatgagaattttgtggatgcctacgagaactccaactccactgagtttgtaagcctggccagcaaggtgaaggacgcgctgaagctgctgtacagcggagtcccattcctgggcccctaccacaaggagtcggctgtgacggccttcagcgagggcagcgtcatcgcctactactggtctgagttcagcatcccgcagcacctggtggaggaggccgagcgcgtcatggccgaggagcgcgtagtcatgctgcccccgcgggcgcgctccctgaagtcctttgtggtcacctcagtggtggctttccccacggactccaaaacagtacagaggacccaggacaacagctgcagctttggcctgcacgcccgcggtgtggagctgatgcgcttcaccacgcccggcttccctgacagcccctaccccgctcatgcccgctgccagtgggccctgcggggggacgccgactcagtgctgagcctcaccttccgcagctttgaccttgcgtcctgcgacgagcgcggcagcgacctggtgacggtgtacaacaccctgagccccatggagccccacgccctggtgcagttgtgtggcacctaccctccctcctacaacctgaccttccactcctcccagaacgtcctgctcatcacactgataaccaacactgagcggcggcatcccggctttgaggccaccttcttccagctgcctaggatgagcagctgtggaggccgcttacgtaaagcccaggggacattcaacagcccctactacccaggccactacccacccaacattgactgcacatggaacattgaggtgcccaacaaccagcatgtgaaggtgcgcttcaaattcttctacctgctggagcccggcgtgcctgcgggcacctgccccaaggactacgtggagatcaatggggagaaatactgcggagagaggtcccagttcgtcgtcaccagcaacagcaacaagatcacagttcgcttccactcagatcagtcctacaccgacaccggcttcttagctgaatacctctcctacgactccagtgacccatgcccggggcagttcacgtgccgcacggggcggtgtatccggaaggagctgcgctgtgatggctgggccgactgcaccgaccacagcgatgagctcaactgcagttgcgacgccggccaccagttcacgtgcaagaacaagttctgcaagcccctcttctgggtctgcgacagtgtgaacgactgcggagacaacagcgacgagcaggggtgcagttgtccggcccagaccttcaggtgttccaatgggaagtgcctctcgaaaagccagcagtgcaatgggaaggacgactgtggggacgggtccgacgaggcctcctgccccaaggtgaacgtcgtcacttgtaccaaacacacctaccgctgcctcaatgggctctgcttgagcaagggcaaccctgagtgtgacgggaaggaggactgtagcgacggctcagatgagaaggactgcgactgtgggctgcggtcattcacgagacaggctcgtgttgttgggggcacggatgcggatgagggcgagtggccctggcaggtaagcctgcatgctctgggccagggccacatctgcggtgcttccctcatctctcccaactggctggtctctgccgcacactgctacatcgatgacagaggattcaggtactcagaccccacgcagtggacggccttcctgggcttgcacgaccagagccagcgcagcgcccctggggtgcaggagcgcaggctcaagcgcatcatctcccaccccttcttcaatgacttcaccttcgactatgacatcgcgctgctggagctggagaaaccggcagagtacagctccatggtgcggcccatctgcctgccggacgcctcccatgtcttccctgccggcaaggccatctgggtcacgggctggggacacacccagtatggaggcactggcgcgctgatcctgcaaaagggtgagatccgcgtcatcaaccagaccacctgcgagaacctcctgccgcagcagatcacgccgcgcatgatgtgcgtgggcttcctcagcggcggcgtggactcctgccagggtgattccgggggacccctgtccagcgtggaggcggatgggcggatcttccaggccggtgtggtgagctggggagacggctgcgctcagaggaacaagccaggcgtgtacacaaggctccctctgtttcgggactggatcaaagagaacactggggtataggggccggggccacccaaatgtgtacacctgcggggccacccatcgtccaccccagtgtgcacgcctgcaggctggagactggaccgctgactgcaccagcgcccccagaacatacactgtgaactcaatctccagggctccaaatctgcctagaaaacctctcgcttcctcagcctccaaagtggagctgggaggtagaaggggaggacactggtggttctactgacccaactgggggcaaaggtttgaagacacagcctcccccgccagccccaagctgggccgaggcgcgtttgtgtatatctgcctcccctgtctgtaaggagcagcgggaacggagcttcggagcctcctcagtgaaggtggtggggctgccggatctgggctgtggggcccttgggccacgctcttgaggaagcccaggctcggaggaccctggaaaacagacgggtctgagactgaaattgttttaccagctcccagggtggacttcagtgtgtgtatttgtgtaaatgagtaaaacattttatttctttttaaaaaaaaaaa

SEQ ID NO: 69 - DNA, 2641 bp, Homo sapiens
ggggagagcgggtgtttgaaggctccgcggaccggcactaggagccgggggcgggtccgtgaccctccggctgctcggagtgaacaggcggccaggaaagaagcgggcctgaacaccatgatccctttggagaagccaggcagcggcggctcctccccaggcgccacctcaggctcgggccgggcaggccggggtctgagcgggccgtgccggccgccgccgccgccccaggcccgcgggctgctgacagagatacgcgccgtggtgcgcaccgagcccttccaggacggctacagcctgtgcccgggccgggagctgggcagggggaaatttgcagtggtgagaaaatgtataaagaaagattctgggaaagaatttgctgcaaagttcatgagaaaaagaagaaaaggccaagattgtcggatggaaataattcatgagattgctgtacttgaactagcacaagacaatccttgggtcattaatttacatgaagtttatgagactgcatcagaaatgatcttagttctggaatatgctgctgggggtgaaatctttgaccagtgtgttgcagacagagaagaagcctttaaagaaaaagatgttcaaagacttatgcgacagattttagaaggtgttcactttttacacactcgtgatgtagttcatcttgatttgaagcctcagaatattctgttgacaagtgaatctccattgggtgacattaagattgttgattttggcctttcaagaatattgaagaacagtgaagagctccgagaaattatgggtacccctgaatatgtggctcctgaaattcttagttatgatcctataagcatggcaacagatatgtggagcattggagtgttaacatatgtcatgcttacaggaatatcacctttcttaggcaatgataaacaagaaacattcttaaacatctcacagatgaatttaagttattctgaggaagaatttgatgttttgtctgagtcggctgttgatttcatcaggacacttttagttaagaaacctgaagatcgagccactgctgaagaatgtctaaagcacccctggttgacacagagcagtattcaagagccttctttcaggatggaaaaggcactagaagaagcaaatgccctccaagaaggtcattctgtgcctgaaattaattcggataccgacaaatcagaaaccgaggaatccattgtaaccgaagagttaattgtagttacttcatatactctaggacaatgcagacagtctgaaaaagagaaaatggagcaaaaggccatttccaaacgatttaaatttgaggaacctttgctacaagaaattccaggagaatttatctactgagcaatatttccctttagaacttcaagatttctacactgaaaatgttaatattatttatggacctctggccaaatggtacatgtactggaagtggataaccagtatcacttacacaaacaaaaataactttgtcaaatttgtggagttaggtggaagccagattttaaaagttgccaaccaggatatttaacaggtacagttacccgtttcaatgttatttttaagaagggagatgttggcacctttgaattctacatcctgtttctccagaatgagaatttgtgtacaaagatatttgtattcactttctttaaaaaatccaagtaaaagtgccaaaactacatttctgtaaatctcttgcattattcatatgtgtatctatatctgcataatgtttgttaatgtctactaaaattgctactttttcactttggatttgtttttggcaaaattttagtctaaacagacatctaaattttcgagacttagaataacattcactaaagtttgataatgtcttttttaaatattttcttactgctttatagtgacttgatttggtttctgttgtgtttttgcctaaatactagtaacatatcagtgaaaaaccctaattttttttctcttcaatgtcactagtaagagaggtggtaatttttcacctctgaaattattctgggtttaggtgtcagcttttgagctgcttccctcatcacaccacactcacatgcatctgttctctctcacactctatacccctgccacttcctggcacctccccccatgcttgtcatttaattttggccacttgtaggtatcagtgtgatctgatcaacactctggttaccttggtcagtgaaaagatgctactatattgcttttgtcccaaagtgagtaaaatcccctagagcagagagagagagagagagagagtgtcttcatgccaaccacagcctgtttctgctgagtttcttatcagccctcaagctatgctaggaaaagttataaaatgccaaaatatttataaacatttactttgtccataaaaaatttacattggatactctgtaagtaggaggtactttgtcccaaaaagatgtataagaatgtactaatagttttatttgattaggattgaacagttcagttgtatctatgccccacagtgaccagtaaagtccaattaaaatatggaaatgtaaaagtgtatgccgaataccttaaagtaactaattatccttacacacaaaaggctcagtgcattaaatatttgcctatc

SEQ ID NO: 70 - DNA, 1982 bp, Homo sapiens
gcggacgcgtgggctggaaacaacccaattgtctatcaacagtgactggaaggacaaattgtgctatgtccacacattagaataccagttggcagtcaaaaaggaagagctgatctgtgcagcaatttgagtctcagtaatttcatgtgaataaccctataccttccaatttgaaatcagaagcaaaaaaggctgccaaaatattaagagaattcacagaaataacttccagaaatggacctgataagatcattcctgctcacgtaattgcgaaggctaaaggccttgcaattctgtctgtgatcaaagccgggttcctggtgactgccagaggaggcagcgggattgtagtggcgcgccttccagatggaaaatggtctgcaccctcagccattgggatagctggccttggtggaggatttgaaataggaattgagacacatttacagctacatattccctctgagcattgccctggctgccttccataagtgtggagtgccactccagctttcttaggttgccatctgcatgacacatctttctccatccttttactgtcaatctaatggtatcagacttggtgataattctgaattatgaccgtgctgtagaagcttttgcaaaaggcggaaatctgaccctcggagggaacttgactgtggcggttgggcccttgggaaggaacttggaaggaaacgtggccctgagaagctccgctgccgtcttcacgtactgcaagtcaaggggactctttgcaggcgtgtctttagaagggagctgtttgattgaaaggaaagaaactaatagaaaattttattgtcaagatatccgagcttatgacattttatttggagatacaccgcggcctgctcaagccgaagatctttatgaaattcttgattcctttactgaaaagtatgaaaatgaaggacaacgaatcaatgcaagaaaagcagcaagggagcagaggaagtcttctgctaaagaattacctccaaagccattgtcaagaccacagcagtcatctgcaccagtccagctgaactctggctctcaaagcaacagaaatgaatataagctctatcctggactttccagctatcatgagagagttggcaatttgaatcaacccatagaagtgacagcgctgtattcatttgaaggacagcagcctggggatttgaattttcaagctggagacagaatcacagttatatcaaaaacagattcacattttgattggtgggaaggaaaacttcgaggtcaaactggcatttttccagccaactacgtaaccatgaattaaagcgtatactattttcttctttgagaattacaaaaaaattatttctacactgacaggatttactagttaagcaatgtttaatataaattttaaaaaacttctgttctacaaaatttccattccgtatgtaaaagattttgtttttctatataaaaagagctgactgacatatctttaaatactttgtactaactttatcacacttactgtgtcatagaatatcatacagtttatacgctcatagttctcttgtgaacacttcaaacatcgctaagcatttgatctggccatgtatatggtagctgtgttttaatttgagaatcttgagggtagagccacaaatttcaattcttacatttccatttgcaaagtgactagagaaaaagaaatcagcttaaatgaggtattaagtaatgtttagagttgtaggtattaactagaatataaatccttagaaattgtctttataccttcaaaaattatactatgcatttatcatagaaatgtgattacaaagaagtctgactaccatgtctttaaacatatggcatctctcaacttttcttccttatggggctacatttgttcatttccagcagtagcataaacttacggtgacatggtagacttgtctctaaataaaatttttaaatgttaaaaaaaaaaaaaaaaa

SEQ ID NO: 71 - DNA, 3304 bp, Homo sapiens
gcgaccgaacgcggcggtcggcagcgttcgcgcgggggcctgcgaagcgctgctcggggccggcactgcccgcggggaggacgcgccgccgccgccacccagcgccgccgccgccgccgcctccagccgggccgccgcgcgtcccgggggccggccccgcgagcgcaggagtaaacaccgccggagtcttggagccgctgcagaagggaataaagagagatgcagggatttgtgaggttacggcgccccagctgcaagatgcactagccggctgaacccgggatcggctgacttgttggaaccggagtgctctgcacggagagtggtggatgagttgaagttgccttcccggggctcattttccacgctgccgagaggaatccgagaggcaaggcaatcacttcgtcttgccattgattgggtatcgggagctttttttttctcccctctctctttcttttcctccgtcttgttgcatgcaagaaaattacagtccgctgctcgcccgccctgggtgcgagatattcagccccgctctctcccgtgcattgtgcaacccaaagatgaaagaccgaaggggagaaagttaaagaaatcgcccacatgcgctggatcagtccacggcttggggaaaggcatccagagaaggtgggagcggagagtttgaagtctttacaggcgggaagatggcggactggagctgaaagtgttgattgggaaacttgggtgattcttgtgtttatttacaatcctcttgacccaggcaggacacatgcaggccaaaaaacgctatttcatcctgctctcagctggctcttgtctcgcccttttgttttatttcggaggcttgcagtttagggcatcgaggagccacagccggagagaagaacacagcggtaggaatggcttgcaccaccccagtccggatcatttctggccccgcttcccggagcctctgcgccccttcgttccttgggatcaattggaaaacgaggattccagcgtgcacatttccccccggcagaagcgagatgccaactccagcatctacaaaggcaagaagtgccgcatggagtcctgcttcgatttcaccctttgcaagaaaaacggcttcaaagtctacgtatacccacagcaaaaaggggagaaaatcgccgaaagttaccaaaacattctagcggccatcgagggctccaggttctacacctcggaccccagccaggcgtgcctctttgtcctgagtctggatactttagacagagaccagttgtcacctcagtatgtgcacaatttgagatccaaagtgcagagtctccacttgtggaacaatggtaggaatcatttaatttttaatttatattccggcacttggcctgactacaccgaggacgtggggtttgacatcggccaggcgatgctggccaaagccagcatcagtactgaaaacttccgacccaactttgatgtttctattcccctcttttctaaggatcatcccaggacaggaggggagagggggtttttgaagttcaacaccatccctcctctcaggaagtacatgctggtattcaaggggaagaggtacctgacagggataggatcagacaccaggaatgccttatatcacgtccataacggggaggacgttgtgctcctcaccacctgcaagcatggcaaagactggcaaaagcacaaggattctcgctgtgacagagacaacaccgagtatgagaagtatgattatcgggaaatgctgcacaatgccactttctgtctggttcctcgtggtcgcaggcttgggtccttcagattcctggaggctttgcaggctgcctgcgtccctgtgatgctcagcaatggatgggagttgccattctctgaagtgattaattggaaccaagctgccgtcataggcgatgagagattgttattacagattccttctacaatcaggtctattcatcaggataaaatcctagcacttagacagcagacacaattcttgtgggaggcttatttttcttcagttgagaagattgtattaactacactagagattattcaggacagaatattcaagcacatatcacgtaacagtttaatatggaacaaacatcctggaggattgttcgtactaccacagtattcatcttatctgggagattttccttactactatgctaatttaggtttaaagcccccctccaaattcactgcagtcatccatgcggtgacccccctggtctctcagtcccagccagtgttgaagcttctcgtggctgcagccaagtcccagtactgtgcccagatcatagttctatggaattgtgacaagcccctaccagccaaacaccgctggcctgccactgctgtgcctgtcgtcgtcattgaaggagagagcaaggttatgagcagccgttttctgccctacgacaacatcatcacagacgccgtgctcagccttgacgaggacacggtgctttcaacaacagaggtggatttcgccttcacagtgtggcagagcttccctgagaggattgtggggtaccccgcgcgcagccacttctgggataactctaaggagcggtggggatacacatcaaagtggacgaacgactactccatggtgttgacaggagctgctatttaccacaaatattatcactacctatactcccattacctgccagccagcctgaagaacatggtggaccaattggccaattgtgaggacattctcatgaacttcctggtgtctgctgtgacaaaattgcctccaatcaaagtgacccagaagaagcagtataaggagacaatgatgggacagacttctcgggcttcccgttgggctgaccctgaccactttgcccagcgacagagctgcatgaatacgtttgccagctggtttggctacatgccgctgatccactctcagatgaggctcgaccccgtcctctttaaagaccaggtctctattttgaggaagaaataccgagacattgagcgactttgaggaatccggctgagtgggggaggggaagcaagaagggatgggggtcaagctgctctctcttcccagtgcagatccactcatcagcagagccagattgtgccaactatccaaaaacttagatgagcagaatgacaaaaaaaaaaaaggccaatgagaactcaactcctggctcctgggactgcaccagactgctccaaactcacctcactggcttctgtgtcccaagactaggttggtacagtttaattatggaacattaaataattatttttgaaaaaaaaaaaaaaaaaa

SEQ ID NO: 72 - DNA, 4266 bp, Homo sapiens
ccgggctgtgagtctctcgccgccggaggaagatgaggctgaagattgggttcatcttacgcagtttgctggtggtgggaagcttcctggggctagtggtcctctggtcttccctgaccccgcggccggacgacccaagcccgctgagcaggatgagggaagacagagatgtcaatgaccccatgcccaaccgaggcggcaatggactagctcctggggaggacagattcaaacctgtggtaccatggcctcatgttgaaggagtagaagtggacttagagtctattagaagaataaacaaggccaaaaatgaacaagagcaccatgctggaggagattcccagaaagatatcatgcagaggcagtatctcacatttaagcctcagacattcacctaccatgatcctgtgcttcgcccagggatcctcggtaactttgaacccaaagaacctgagcctcctggagtggttggtggccctggagagaaagccaagccattggttttgggaccagaattcaaacaagcaattcaagccagcattaaagagtttggatttaacatggtggcaagtgacatgatctcactggaccgcaacgtcaatgacttacgccaagaagaatgcaagtattggcattatgatgaaaacttgctcacttcgagcgttgtcattgtcttccataatgaaggatggtcaaccctcatgagaacagtccacagtgtaattaaaaggactccaaggaaatatttagcagaaattgtgttaattgacgatttcagtaataaagaacacttaaaagaaaaactggatgaatatattaagctgtggaatggcctagtgaaggtatttcgaaatgaaagaagggaaggtttaattcaagcacgaagtattggtgctcagaaggctaaacttggacaggttttgatataccttgatgcccactgtgaagtggcagttaactggtatgcaccacttgtagctcccatatctaaggacagaaccatttgcactgtgccgcttatagatgtcataaatggcaacacatatgaaattataccccaagggggtggtgatgaagatgggtatgcccgaggagcatgggattggagtatgctctggaaacgggtgcctctgacccctcaagagaagagactgagaaaaacaaaaactgaaccgtatcggtccccagccatggctgggggattatgtgccattgaacgagagttcttctttgaattgggtctctatgatccaagtctccagatttggggtggtgaaaactttgagatctcatacaagatatggcagtgtggtggcaaattattatttgttccttgttctcgtgttggacatatctaccgtcttgagggctggcaaggaaatcctccgcccatttatgttgggtcttctccaactctgaagaattatgttagagttgtggaggtttggtgggatgaatataaagactacttctatgctagtcgtcctgaatcgcaggcattaccatatggggatatatcggagctgaaaaaatttcgagaagatcacaactgccaaagttttaagtggttcatggaagaaatagcttatgatatcacctcacactaccctttgccacccaaaaatgttgactggggagaaatcagaggcttcgaaactgcttactgcattgatagcatgggaaaaacaaatggaggctttgttgaactaggaccctgccacaggatgggagggaatcagcttttcagaatcaatgaagcaaatcaactcatgcagtatgaccagtgtttgacaaagggagctgatggatcaaaagttatgattacacactgtaatctaaatgaatttaaggaatggcagtacttcaagaacctgcacagatttactcatattccttcaggaaagtgtttagatcgctcagaggtcctgcatcaagtattcatctccaattgtgactccagtaaaacgactcaaaaatgggaaatgaataacatccatagtgtttagagagaaaaaaataaaccaataacctacctactgacaagtaaatttatacaggactgaaaaccgcctggaaacctgctgcaactattgttattaactctgtatagctccaaacctggaacctcctgatcagtttgaaggacattgataaactgtgattttacaataacattatcatctgcagttactgtttacaagactgctttttaccttaaactttgtagatgtttacatcttttttgttgtgttttaaagatgatgttggtaatttgtgccttttagctctgttttattaaacagagttaaagcatgttgtcttctttgggattacactcaggggttctgaaaggcagtttgatttttatttttaacacacttgaaaaaaggttggagtaaccagactttcatatataacttggtgattatcaacctgttgtgtctttatttaattttacatctttttgaagcactgccacaggttattagccaaggtggccttccttcacagtcatgctgcttttttgaaaggtgaatttcaacacatttagtgcctctttcatttctcagtatatatttcaagagcttgtgatgaaatctataggatggtaatgatggacttgtcacctgtatggggaatacttttactactcagaaatgaatttatgtgctgccatttgctataaagttgaactttgtatggcttgaaaaagaaatgaccatatggaacatcccaaggctgtcccataagggttggaagttgtgtagcattcactcccttacctactggcattcccagtgccctctgtccatacctacttctaggattgcaaagggagtcttccaactagaagaaaaattgtccactgacatttgggatttacttttctccaatacctgccaatacagaaaactattatcagttgttattgttatcccttgaaaagcgagggtgacaaaaacaacaaaacaccgttataaacacatcaaaggttcattctgactgaggtaagactttccaagcccttgttagattaggccttataaaacttgtgtgcattataacctaagctgtgcaacctggtgaagccaagagtgaactgatgtttcatttatattttcatccaaatgacattatctgcacgtttttaaaatttaaaaacaaaggactatttaaaaatacagtttattaacaaacgtgaaactactttctgttacattaggtgttccctagtgtttcttaatttctttttagaaagtgtatttttattagtatttttccggtgaacagaagatttgtttggatttaaacatttactaagacagtacctattaggaaaaccaaatattgcaaatggtcaattcgattttaatttctcaaaagatactctgttatccagaagattaaaatgcctacattgagtgcttaaaaaaaaaaacaactgtgatgatgtgagcagaatggcaagtaagttaagcatttttgatcctgtaatcatggtatcattacaatgaaaggaattcacaaactactgccagaggaagtttgttttttaatttaagagggaaatataacctataaatttgtttcttccaagcttagctcttaaatttgggagactcaaagttaaacatcctcaacagagttttatttataattttgaattgtcaatttgtattttgctactgatctgtgatcaaccattttaactttcatctctagggatgtttaacatttataattgcaaaataaaccaactataaaaaaagaaactaagagagaattggtactttaattacttgtgtgtttgcaaataggctccattttccatgttgagtagattataaccttattaactaggcataggcctaagaaaggtggcaatgaactgtgcatgtaaattttaaatgggtactttgtgcaattcgttaaaagaagatactctatgaatatgattctatatattgaaatcagaaaacctaccaaacaaaaacatcagaagctgctgccataatgactattttctactgtaggctgctttggaaataattcccatatccttgctttgtaagttggtaatatcactatgcatttctacacattttataaatttgatttatgcagattttgatacactgtatgtttctgtagaaattgtataaatattcaaaattttattaggataaatttgagaaacttacgtatatcttaattctgggttgcttgttttttaggtgacaaaaataaaatattgtattttaattc

SEQ ID NO: 73 - DNA, 3148 bp, Homo sapiens
gtgggaagggcctgtgggtttattataaggcggagctcggcgggagaggtgcgggccgaatccgagccgagcggagaggaatccggcagtagagagcggactccagccggcggaccctgcagccctcgcctgggacagcggcgcgctgggcaggcgcccaagagagcatcgagcagcggaacccgcgaagccggcccgcagccgcgacccgcgcagcctgccgctctcccgccgccggtccgggcagcatgaggcgcgcggcgctctggctctggctgtgcgcgctggcgctgagcctgcagccggccctgccgcaaattgtggctactaatttgccccctgaagatcaagatggctctggggatgactctgacaacttctccggctcaggtgcaggtgctttgcaagatatcaccttgtcacagcagaccccctccacttggaaggacacgcagctcctgacggctattcccacgtctccagaacccaccggcctggaggctacagctgcctccacctccaccctgccggctggagaggggcccaaggagggagaggctgtagtcctgccagaagtggagcctggcctcaccgcccgggagcaggaggccaccccccgacccagggagaccacacagctcccgaccactcatcaggcctcaacgaccacagccaccacggcccaggagcccgccacctcccacccccacagggacatgcagcctggccaccatgagacctcaacccctgcaggacccagccaagctgaccttcacactccccacacagaggatggaggtccttctgccaccgagagggctgctgaggatggagcctccagtcagctcccagcagcagagggctctggggagcaggacttcacctttgaaacctcgggggagaatacggctgtagtggccgtggagcctgaccgccggaaccagtccccagtggatcagggggccacgggggcctcacagggcctcctggacaggaaagaggtgctgggaggggtcattgccggaggcctcgtggggctcatctttgctgtgtgcctggtgggtttcatgctgtaccgcatgaagaagaaggacgaaggcagctactccttggaggagccgaaacaagccaacggcggggcctaccagaagcccaccaaacaggaggaattctatgcctgacgcgggagccatgcgccccctccgccctgccactcactaggcccccacttgcctcttccttgaagaactgcaggccctggcctcccctgccaccaggccacctccccagcattccagcccctctggtcgctcctgcccacggagtcgtggggtgtgctgggagctccactctgcttctctgacttctgcctggagacttagggcaccaggggtttctcgcataggacctttccaccacagccagcacctggcatcgcaccattctgactcggtttctccaaactgaagcagcctctccccaggtccagctctggaggggagggggatccgactgctttggacctaaatggcctcatgtggctggaagatcctgcgggtggggcttggggctcacacacctgtagcacttactggtaggaccaagcatcttgggggggtggccgctgagtggcaggggacaggagtccactttgtttcgtggggaggtctaatctagatatcgacttgtttttgcacatgtttcctctagttctttgttcatagcccagtagaccttgttacttctgaggtaagttaagtaagttgattcggtatccccccatcttgcttccctaatctatggtcgggagacagcatcagggttaagaagacttttttttttttttttaaactaggagaaccaaatctggaagccaaaatgtaggcttagtttgtgtgttgtctcttgagtttgtcgctcatgtgtgcaacagggtatggactatctgtctggtggccccgtttctggtggtctgttggcaggctggccagtccaggctgccgtggggccgccgcctctttcaagcagtcgtgcctgtgtccatgcgctcagggccatgctgaggcctgggccgctgccacgttggagaagcccgtgtgagaagtgaatgctgggactcagccttcagacagagaggactgtagggagggcggcaggggcctggagatcctcctgcagaccacgcccgtcctgcctgtggcgccgtctccaggggctgcttcctcctggaaattgacgaggggtgtcttgggcagagctggctctgagcgcctccatccaaggccaggttctccgttagctcctgtggccccaccctgggccctgggctggaatcaggaatattttccaaagagtgatagtcttttgcttttggcaaaactctacttaatccaatgggtttttccctgtacagtagattttccaaatgtaataaactttaatataaagtagtcctgtgaatgccactgccttcgcttcttgcctctgtgctgtgtgtgacgtgaccggacttttctgcaaacaccaacatgttgggaaacttggctcgaatctctgtgccttcgtctttcccatggggagggattctggttccagggtccctctgtgtatttgcttttttgttttggctgaaattctcctggaggtcggtaggttcagccaaggttttataaggctgatgtcaatttctgtgttgccaagctccaagccccatcttctaaatggcaaaggaaggtggatggccccagcacagcttgacctgaggctgtggtcacagcggaggtgtggagccgaggcctaccccgcagacaccttggacatcctcctcccacccggctgcagaggccagaggcccccagcccagggctcctgcacttacttgcttatttgacaacgtttcagcgactccgttggccactccgagaggtgggccagtctgtggatcagagatgcaccaccaagccaagggaacctgtgtccggtattcgatactgcgactttctgcctggagtgtatgactgcacatgactcgggggtggggaaaggggtcggctgaccatgctcatctgctggtccgtgggacggtgcccaagccagaggctgggttcatttgtgtaacgacaataaacggtacttgtcatttcgggca

SEQ ID NO: 74 - DNA, 5717 bp, Homo sapiens
ggctaccgctcccggcttggcgtcccgcgcgcacttcggcgatggcttttccgccgcggcgacggctgcgcctcggtccccgcggcctcccgcttcttctctcgggactcctgctacctctgtgccgcgccttcaacctagacgtggacagtcctgccgagtactctggccccgagggaagttacttcggcttcgccgtggatttcttcgtgcccagcgcgtcttcccggatgtttcttctcgtgggagctcccaaagcaaacaccacccagcctgggattgtggaaggagggcaggtcctcaaatgtgactggtcttctacccgccggtgccagccaattgaatttgatgcaacaggcaatagagattatgccaaggatgatccattggaatttaagtcccatcagtggtttggagcatctgtgaggtcgaaacaggataaaattttggcctgtgccccattgtaccattggagaactgagatgaaacaggagcgagagcctgttggaacatgctttcttcaagatggaacaaagactgttgagtatgctccatgtagatcacaagatattgatgctgatggacagggattttgtcaaggaggattcagcattgattttactaaagctgacagagtacttcttggtggtcctggtagcttttattggcaaggtcagcttatttcggatcaagtggcagaaatcgtatctaaatacgaccccaatgtttacagcatcaagtataataaccaattagcaactcggactgcacaagctatttttgatgacagctatttgggttattctgtggctgtcggagatttcaatggtgatggcatagatgactttgtttcaggagttccaagagcagcaaggactttgggaatggtttatatttatgatgggaagaacatgtcctccttatacaattttactggcgagcagatggctgcatatttcggattttctgtagctgccactgacattaatggagatgattatgcagatgtgtttattggagcacctctcttcatggatcgtggctctgatggcaaactccaagaggtggggcaggtctcagtgtctctacagagagcttcaggagacttccagacgacaaagctgaatggatttgaggtctttgcacggtttggcagtgccatagctcctttgggagatctggaccaggatggtttcaatgatattgcaattgctgctccatatgggggtgaagataaaaaaggaattgtttatatcttcaatggaagatcaacaggcttgaacgcagtcccatctcaaatccttgaagggcagtgggctgctcgaagcatgccaccaagctttggctattcaatgaaaggagccacagatatagacaaaaatggatatccagacttaattgtaggagcttttggtgtagatcgagctatcttatacagggccagaccagttatcactgtaaatgctggtcttgaagtgtaccctagcattttaaatcaagacaataaaacctgctcactgcctggaacagctctcaaagtttcctgttttaatgttaggttctgcttaaaggcagatggcaaaggagtacttcccaggaaacttaatttccaggtggaacttcttttggataaactcaagcaaaagggagcaattcgacgagcactgtttctctacagcaggtccccaagtcactccaagaacatgactatttcaagggggggactgatgcagtgtgaggaattgatagcgtatctgcgggatgaatctgaatttagagacaaactcactccaattactatttttatggaatatcggttggattatagaacagctgctgatacaacaggcttgcaacccattcttaaccagttcacgcctgctaacattagtcgacaggctcacattctacttgactgtggtgaagacaatgtctgtaaacccaagctggaagtttctgtagatagtgatcaaaagaagatctatattggggatgacaaccctctgacattgattgttaaggctcagaatcaaggagaaggtgcctacgaagctgagctcatcgtttccattccactgcaggctgatttcatcggggttgtccgaaacaatgaagccttagcaagactttcctgtgcatttaagacagaaaaccaaactcgccaggtggtatgtgaccttggaaacccaatgaaggctggaactcaactcttagctggtcttcgtttcagtgtgcaccagcagtcagagatggatacttctgtgaaatttgacttacaaatccaaagctcaaatctatttgacaaagtaagcccagttgtatctcacaaagttgatcttgctgttttagctgcagttgagataagaggagtctcgagtcctgatcatatctttcttccgattccaaactgggagcacaaggagaaccctgagactgaagaagatgttgggccagttgttcagcacatctatgagctgagaaacaatggtccaagttcattcagcaaggcaatgctccatcttcagtggccttacaaatataataataacactctgttgtatatccttcattatgatattgatggaccaatgaactgcacttcagatatggagatcaaccctttgagaattaagatctcatctttgcaaacaactgaaaagaatgacacggttgccgggcaaggtgagcgggaccatctcatcactaagcgggatcttgccctcagtgaaggagatattcacactttgggttgtggagttgctcagtgcttgaagattgtctgccaagttgggagattagacagaggaaagagtgcaatcttgtacgtaaagtcattactgtggactgagacttttatgaataaagaaaatcagaatcattcctattctctgaagtcgtctgcttcatttaatgtcatagagtttccttataagaatcttccaattgaggatatcaccaactccacattggttaccactaatgtcacctggggcattcagccagcgcccatgcctgtgcctgtgtgggtgatcattttagcagttctagcaggattgttgctactggctgttttggtatttgtaatgtacaggatgggcttttttaaacgggtccggccacctcaagaagaacaagaaagggagcagcttcaacctcatgaaaatggtgaaggaaactcagaaacttaactgcagtttttaagttatgctacatcttgacccactagaattagcaactttattatagatttaaactttcttcatgaggagtaaaaatccaaggctttactgctgatagtgctaattggcattaaccacaaaatgagaattatatttgtcaaccttctccttataaataagttcagacatacatttaataacatagggtgacttgtgtttttaggtatttaaataataaaatttcaagggatagtttttattcaatgtatataagacaggtagtgcctgatttactactttatataaaatagtacctccttcagttactgtttctgatttaatgtacggaactttatttgttgttgttgttgttgttgttgttgttgttttaaagcagtccaaatttggaccttagcaatcatgtcttttgtataggtacttaatgttaatacatattacactacagtttacttttcagaatactaaagactttataactgcatgaacttggatttttttaatcactcatatggtagaattttataaacacatacatgataccatccaaattcttgcttttaataacaaaggtacaatattttgttttagtatgaaaatctggtagatcctattacacttctgtttatattaaatccacaatattttattacatttttaacttgtataaattttaggtcaaatccttcaagccaacctatactaaaaattagttccataatcacaaatggctcttttgtgtaattgtttaatttcacctgaatatcataatgcttaaagccatatggagttggaaattatttccaaagcatatttattccattgttttagtctggctatttacagtataaaaaaagcattttattaaaatactgtgtagttctttgagatagttgcttatgcatatagtaagtattacattcttagagtagagcagagtttttagttagtattaatttattttcctccattcatgtacttttccttatatttccaaaactgttactgagaatgggtcaagatcagtgagaaatctttacagttgacaggaacctggaccccttaccccaactttatgagtaatgcttggaataaaaaactcttaaggcaactcactgatttacttctagcaatagcatgatgttacaggaatattacctctgtttaagcaaggtaatgtgtaaaatcagtctcggctgtcagaataacttctaaaaggtatttttataagcagttcaagttactgaaaaccttttaaacctttctgaagttcgttagtataaattacttttctaggattattaataaaagccacataggtggcaagttgtagttttatatggctctgtagagtggtgaaccttctagaggaatatatgatttattcacagttcctcaaggcctggggatgatgatcagttatacctatttttgtgcaattacatcatgttgtacattagaaatggagagtttaatagctctttaactgctgtcctcattaggtaatgataaatatttcccttaaataattgactattttgctgtgttttaaaaatgattgaaatttatcttgccatatctcataatttcatgcacaagttgactgagctaatcttgagaatatattcgtaaaataggagcacatttagttgaggtatacaaggtaggactctagacaaaaccttctattttagctttagtgaatttcaaaagtaatgggtcttggagtatagatttttattagtagcttgaaagagcttaatcatatgcagtaagtatttttattaccaataaatttaaaattttttaagaaaaatatttttatcctagggccaagtgttgcctgccaccaatcagtaagttagtctataacaaattttaccctaacagttttaccacctagcaacagtcatttctgaaaatatgttggatagaaagtcactctttggcaaaagtgttagaatttgcttttgtgccatctattccttttatggcatctatcttgaaagtaatcttgtattggagattgaaagatgctgtaatttagaaattaacatgatatcttaaattacctttatgaaatatagttttgtataatagcatagattttccttcaaaaaatgaacatttatatatctacaaaaatatggagaagagcaatttgaaagcctactttctgaagaaaatggtgggatttttttttatcatgattaaatatcaaaaaattgccctatgaaaactttaaatctctaaaacatttgaaatactaccatatttgtgatttattgagaataaaaatccattttgaaatgtaaaatttttatgatctgattcagttttaagaaaacatgaatgaactagaagatattaaaaacatttgacattggtaagaaatattgatactgatattgatttttatataggtatttatttcagaattgatattttgagaaaaatacatgtgagtcattttttctgtttctcttttctcttaacgattatcactgtaattctgaatct

SEQ ID NO: 75 - DNA, 2528 bp, Homo sapiens
gccacgtgtccggctcggagcccacggctgtcctcccggtccgcgccgctgcggttgctgctgggctaacgggctccgatccagcgagcgctgcgtcctcgagtccgcccgtgcgggcgcagggacccgaggcctccgctgcggctggattctgctgcgaaccggagaccatggccaaaccagcacagggtgccaagtaccggggctccatccatgacttcccaggctttgaccccaaccaggatgccgaggctctgtacactgccatgaagggctttggcagtgacaaggaggccatactggacataatcacctcacggagcaacaggcagaggcaggaggtctgccagagctacaagtccctctacggcaaggacctcattgctgatttaaagtatgaattgacgggcaagtttgaacggttgattgtgggcctgatgaggccacctgcctattgtgatgccaaagaaattaaagatgccatctcgggcattggcactgatgagaagtgcctcattgagatcttggcttcccggaccaatgagcagatgcaccagctggtggcagcatacaaagatgcctacgagcgggacctggaggctgacatcatcggcgacacctctggccacttccagaagatgcttgtggtcctgctccagggaaccagggaggaggatgacgtagtgagcgaggacctggtacaacaggatgtccaggacctatacgaggcaggggaactgaaatggggaacagatgaagcccagttcatttacatcttgggaaatcgcagcaagcagcatcttcggttggtgttcgatgagtatctgaagaccacagggaagccgatgaaggccagcatccgaggggagctgtctggggactttgagaagctaatgctggccgtagtgaagtgtatccggagcaccccggaatattttgctgaaaggctcttcaaggctatgaagggcctggggactcgggacaacaccctgatccgcatcatggtctcccgtagtgagttggacatgctcgacattcgggagatcttccggaccaagtatgagaagtccctctacagcatgatcaagaatgacacctctggcgagtacaagaagactctgctgaagctgtctgggggagatgatgatgctgctggccagttcttcccggaggcagcgcaggtggcctatcagatgtgggaacttagtgcagtggcccgagtagagctgaagggaactgtgcgcccagccaatgacttcaaccctgacgcagatgccaaagcgctgcggaaagccatgaagggactcgggactgacgaagacacaatcatcgatatcatcacgcaccgcagcaatgtccagcggcagcagatccggcagaccttcaagtctcactttggccgggacttaatgactgacctgaagtctgagatctctggagacctggcaaggctgattctggggctcatgatgccaccggcccattacgatgccaagcagttgaagaaggccatggagggagccggcacagatgaaaaggctcttattgaaatcctggccactcggaccaatgctgaaatccgggccatcaatgaggcctataaggaggactatcacaagtccctggaggatgctctgagctcagacacatctggccacttcaggaggatcctcatttctctggccacggggcatcgtgaggagggaggagaaaacctggaccaggcacgggaagatgcccaggtggctgctgagatcttggaaatagcagacacacctagtggagacaaaacttccttggagacacgtttcatgacgatcctgtgtacccggacgtatccgcacctccggagagtcttccaggagttcatcaagatgaccaactatgacgtggagcacaccatcaagaaggagatgtctggggatgtcagggatgcatttgtggccattgttcaaagtgtcaagaacaagcctctcttctttgccgacaaactttacaaatccatgaagggtgctggcacagatgagaagactctgaccaggatcatggtatcccgcagtgagattgacctgctcaacatccggagggaattcattgagaaatatgacaagtctctccaccaagccattgagggtgacacctccggagacttcctgaaggccttgctggctctctgtggtggtgaggactagggccacagctttggcgggcacttctgccaagaaatggttatcagcaccagccgccatggccaagcctgattgttccagctccagagactaaggaaggggcaggggtggggggaggggttgggttgggctcttatcttcatggagcttaggaaacgctcccactcccacgggccatcgagggccagcacggctgagcggtgaaaaaccgtagccatagatcctgtccacctccactcccctctgaccctcaggctttcccagcttcctccccttgctacagcctctgccctggtttggctatgtcagatccaataaacatcctgaacctctgtctgt

SEQ ID NO: 76 - DNA, 3007 bp, Homo sapiens
gcccggagagccgcatctattggcagctttgttattgatcagaaactgctcgccgccgacttggcttccagtctggctgcgggcaacccttgagttttcgcctctgtcctgtcccccgaactgacaggtgctcccagcaacttgctggggacttctcgccgctcccccgcgtccccaccccctcattcctccctcgccttcacccccacccccaccacttcgccacagctcaggatttgtttaaaccttgggaaactggttcaggtccaggttttgctttgatccttttcaaaaactggagacacagaagagggctctaggaaaaagttttggatgggattatgtggaaactaccctgcgattctctgctgccagagcaggctcggcgcttccaccccagtgcagccttcccctggcggtggtgaaagagactcgggagtcgctgcttccaaagtgcccgccgtgagtgagctctcaccccagtcagccaaatgagcctcttcgggcttctcctgctgacatctgccctggccggccagagacaggggactcaggcggaatccaacctgagtagtaaattccagttttccagcaacaaggaacagaacggagtacaagatcctcagcatgagagaattattactgtgtctactaatggaagtattcacagcccaaggtttcctcatacttatccaagaaatacggtcttggtatggagattagtagcagtagaggaaaatgtatggatacaacttacgtttgatgaaagatttgggcttgaagacccagaagatgacatatgcaagtatgattttgtagaagttgaggaacccagtgatggaactatattagggcgctggtgtggttctggtactgtaccaggaaaacagatttctaaaggaaatcaaattaggataagatttgtatctgatgaatattttccttctgaaccagggttctgcatccactacaacattgtcatgccacaattcacagaagctgtgagtccttcagtgctacccccttcagctttgccactggacctgcttaataatgctataactgcctttagtaccttggaagaccttattcgatatcttgaaccagagagatggcagttggacttagaagatctatataggccaacttggcaacttcttggcaaggcttttgtttttggaagaaaatccagagtggtggatctgaaccttctaacagaggaggtaagattatacagctgcacacctcgtaacttctcagtgtccataagggaagaactaaagagaaccgataccattttctggccaggttgtctcctggttaaacgctgtggtgggaactgtgcctgttgtctccacaattgcaatgaatgtcaatgtgtcccaagcaaagttactaaaaaataccacgaggtccttcagttgagaccaaagaccggtgtcaggggattgcacaaatcactcaccgacgtggccctggagcaccatgaggagtgtgactgtgtgtgcagagggagcacaggaggatagccgcatcaccaccagcagctcttgcccagagctgtgcagtgcagtggctgattctattagagaacgtatgcgttatctccatccttaatctcagttgtttgcttcaaggacctttcatcttcaggatttacagtgcattctgaaagaggagacatcaaacagaattaggagttgtgcaacagctcttttgagaggaggcctaaaggacaggagaaaaggtcttcaatcgtggaaagaaaattaaatgttgtattaaatagatcaccagctagtttcagagttaccatgtacgtattccactagctgggttctgtatttcagttctttcgatacggcttagggtaatgtcagtacaggaaaaaaactgtgcaagtgagcacctgattccgttgccttgcttaactctaaagctccatgtcctgggcctaaaatcgtataaaatctggatttttttttttttttttgctcatattcacatatgtaaaccagaacattctatgtactacaaacctggtttttaaaaaggaactatgttgctatgaattaaacttgtgtcgtgctgataggacagactggatttttcatatttcttattaaaatttctgccatttagaagaagagaactacattcatggtttggaagagataaacctgaaaagaagagtggccttatcttcactttatcgataagtcagtttatttgtttcattgtgtacatttttatattctccttttgacattataactgttggcttttctaatcttgttaaatatatctatttttaccaaaggtatttaatattcttttttatgacaacttagatcaactatttttagcttggtaaatttttctaaacacaattgttatagccagaggaacaaagatgatataaaatattgttgctctgacaaaaatacatgtatttcattctcgtatggtgctagagttagattaatctgcattttaaaaaactgaattggaatagaattggtaagttgcaaagactttttgaaaataattaaattatcatatcttccattcctgttattggagatgaaaataaaaagcaacttatgaaagtagacattcagatccagccattactaacctattccttttttggggaaatctgagcctagctcagaaaaacataaagcaccttgaaaaagacttggcagcttcctgataaagcgtgctgtgctgtgcagtaggaacacatcctatttattgtgatgttgtggttttattatcttaaactctgttccatacacttgtataaatacatggatatttttatgtacagaagtatgtctcttaaccagttcacttattgtactctggcaatttaaaagaaaatcagtaaaatattttgcttgtaaaatgcttaatatcgtgcctaggttatgtggtgactatttgaatcaaaaatgtattgaatcatcaaataaaagaatgtggctattttggggagaaaatt

SEQ ID NO: 77 - DNA, 8368 bp, Homo sapiens
gcgatccgggcgccaccccgcggtcatcggtcaccggtcgctctcaggaacagcagcgcaacctctgctccctgcctcgcctcccgcgcgcctaggtgcctgcgactttaattaaagggccgtcccctcgccgaggctgcagcaccgcccccccggcttctcgcgcctcaaaatgagtagctcccactctcgggcgggccagagcgcagcaggcgcggctccgggcggcggcgtcgacacgcgggacgccgagatgccggccaccgagaaggacctggcggaggacgcgccgtggaagaagatccagcagaacactttcacgcgctggtgcaacgagcacctgaagtgcgtgagcaagcgcatcgccaacctgcagacggacctgagcgacgggctgcggcttatcgcgctgttggaggtgctcagccagaagaagatgcaccgcaagcacaaccagcggcccactttccgccaaatgcagcttgagaacgtgtcggtggcgctcgagttcctggaccgcgagagcatcaaactggtgtccatcgacagcaaggccatcgtggacgggaacctgaagctgatcctgggcctcatctggaccctgatcctgcactactccatctccatgcccatgtgggacgaggaggaggatgaggaggccaagaagcagacccccaagcagaggctcctgggctggatccagaacaagctgccgcagctgcccatcaccaacttcagccgggactggcagagcggccgggccctgggcgccctggtggacagctgtgccccgggcctgtgtcctgactgggactcttgggacgccagcaagcccgttaccaatgcgcgagaggccatgcagcaggcggatgactggctgggcatcccccaggtgatcacccccgaggagattgtggaccccaacgtggacgagcactctgtcatgacctacctgtcccagttccccaaggccaagctgaagccaggggctcccttgcgccccaaactgaacccgaagaaagcccgtgcctacgggccaggcatcgagcccacaggcaacatggtgaagaagcgggcagagttcactgtggagaccagaagtgctggccagggagaggtgctggtgtacgtggaggacccggccggacaccaggaggaggcaaaagtgaccgccaataacgacaagaaccgcaccttctccgtctggtacgtccccgaggtgacggggactcataaggttactgtgctctttgctggccagcacatcgccaagagccccttcgaggtgtacgtggataagtcacagggtgacgccagcaaagtgacagcccaaggtcccggcctggagcccagtggcaacatcgccaacaagaccacctactttgagatctttacggcaggagctggcacgggcgaggtcgaggttgtgatccaggaccccatgggacagaagggcacggtagagcctcagctggaggcccggggcgacagcacataccgctgcagctaccagcccaccatggagggcgtccacaccgtgcacgtcacgtttgccggcgtgcccatccctcgcagcccctacactgtcactgttggccaagcctgtaacccgagtgcctgccgggcggttggccggggcctccagcccaagggtgtgcgggtgaaggagacagctgacttcaaggtgtacacaaagggcgctggcagtggggagctgaaggtcaccgtgaagggccccaagggagaggagcgcgtgaagcagaaggacctgggggatggcgtgtatggcttcgagtattaccccatggtccctggaacctatatcgtcaccatcacgtggggtggtcagaacatcgggcgcagtcccttcgaagtgaaggtgggcaccgagtgtggcaatcagaaggtacgggcctggggccctgggctggagggcggcgtcgttggcaagtcagcagactttgtggtggaggctatcggggacgacgtgggcacgctgggcttctcggtggaagggccatcgcaggctaagatcgaatgtgacgacaagggcgacggctcctgtgatgtgcgctactggccgcaggaggctggcgagtatgccgttcacgtgctgtgcaacagcgaagacatccgcctcagccccttcatggctgacatccgtgacgcgccccaggacttccacccagacagggtgaaggcacgtgggcctggattggagaagacaggtgtggccgtcaacaagccagcagagttcacagtggatgccaagcacggtggcaaggccccacttcgggtccaagtccaggacaatgaaggctgccctgtggaggcgttggtcaaggacaacggcaatggcacttacagctgctcctacgtgcccaggaagccggtgaagcacacagccatggtgtcctggggaggcgtcagcatccccaacagccccttcagggtgaatgtgggagctggcagccaccccaacaaggtcaaagtatacggccccggagtagccaagacagggctcaaggcccacgagcccacctacttcactgtggactgcgccgaggctggccagggggacgtcagcatcggcatcaagtgtgcccctggagtggtaggccccgccgaagctgacatcgacttcgacatcatccgcaatgacaatgacaccttcacggtcaagtacacgccccggggggctggcagctacaccattatggtcctctttgctgaccaggccacgcccaccagccccatccgagtcaaggtggagccctctcatgacgccagtaaggtgaaggccgagggccctggcctcagtcgcactggtgtcgagcttggcaagcccacccacttcacagtaaatgccaaagctgctggcaaaggcaagctggacgtccagttctcaggactcaccaagggggatgcagtgcgagatgtggacatcatcgaccaccatgacaacacctacacagtcaagtacacgcctgtccagcagggtccagtaggcgtcaatgtcacttatggaggggatcccatccctaagagccctttctcagtggcagtatctccaagcctggacctcagcaagatcaaggtgtctggcctgggagagaaggtggacgttggcaaagaccaggagttcacagtcaaatcaaagggtgctggtggtcaaggcaaagtggcatccaagattgtgggcccctcgggtgcagcggtgccctgcaaggtggagccaggcctgggggctgacaacagtgtggtgcgcttcctgccccgtgaggaagggccctatgaggtggaggtgacctatgacggcgtgcccgtgcctggcagcccctttcctctggaagctgtggcccccaccaagcctagcaaggtgaaggcgtttgggccggggctgcagggaggcagtgcgggctcccccgcccgcttcaccatcgacaccaagggcgccggcacaggtggcctgggcctgacggtggagggcccctgtgaggcgcagctcgagtgcttggacaatggggatggcacatgttccgtgtcctacgtgcccaccgagcccggggactacaacatcaacatcctcttcgctgacacccacatccctggctccccattcaaggcccacgtggttccctgctttgacgcatccaaagtcaagtgctcaggccccgggctggagcgggccaccgctggggaggtgggccaattccaagtggactgctcgagcgcgggcagcgcggagctgaccattgagatctgctcggaggcggggcttccggccgaggtgtacatccaggaccacggtgatggcacgcacaccattacctacattcccctctgccccggggcctacaccgtcaccatcaagtacggcggccagcccgtgcccaacttccccagcaagctgcaggtggaacctgcggtggacacttccggtgtccagtgctatgggcctggtattgagggccagggtgtcttccgtgaggccaccactgagttcagtgtggacgcccgggctctgacacagaccggagggccgcacgtcaaggcccgtgtggccaacccctcaggcaacctgacggagacctacgttcaggaccgtggcgatggcatgtacaaagtggagtacacgccttacgaggagggactgcactccgtggacgtgacctatgacggcagtcccgtgcccagcagccccttccaggtgcccgtgaccgagggctgcgacccctcccgggtgcgtgtccacgggccaggcatccaaagtggcaccaccaacaagcccaacaagttcactgtggagaccaggggagctggcacgggcggcctgggcctggctgtagagggcccctccgaggccaagatgtcctgcatggataacaaggacggcagctgctcggtcgagtacatcccttatgaggctggcacctacagcctcaacgtcacctatggtggccatcaagtgccaggcagtcctttcaaggtccctgtgcatgatgtgacagatgcgtccaaggtcaagtgctctgggcccggcctgagcccaggcatggttcgtgccaacctccctcagtccttccaggtggacacaagcaaggctggtgtggccccattgcaggtcaaagtgcaagggcccaaaggcctggtggagccagtggacgtggtagacaacgctgatggcacccagaccgtcaattatgtgcccagccgagaagggccctacagcatctcagtactgtatggagatgaagaggtaccccggagccccttcaaggtcaaggtgctgcctactcatgatgccagcaaggtgaaggccagtggccccgggctcaacaccactggcgtgcctgccagcctgcccgtggagttcaccatcgatgcaaaggacgccggggagggcctgctggctgtccagatcacggatcccgaaggcaagccgaagaagacacacatccaagacaaccatgacggcacgtatacagtggcctacgtgccagacgtgacaggtcgctacaccatcctcatcaagtacggtggtgacgagatccccttctccccgtaccgcgtgcgtgccgtgcccaccggggacgccagcaagtgcactgtcacagtgtcaatcggaggtcacgggctaggtgctggcatcggccccaccattcagattggggaggagacggtgatcactgtggacactaaggcggcaggcaaaggcaaagtgacgtgcaccgtgtgcacgcctgatggctcagaggtggatgtggacgtggtggagaatgaggacggcactttcgacatcttctacacggccccccagccgggcaaatacgtcatctgtgtgcgctttggtggcgagcacgtgcccaacagccccttccaagtgacggctctggctggggaccagccctcggtgcagccccctctacggtctcagcagctggccccacagtacacctacgcccagggcggccagcagacttgggccccggagaggcccctggtgggtgtcaatgggctggatgtgaccagcctgaggccctttgaccttgtcatccccttcaccatcaagaagggcgagatcacaggggaggttcggatgccctcaggcaaggtggcgcagcccaccatcactgacaacaaagacggcaccgtgaccgtgcggtatgcacccagcgaggctggcctgcacgagatggacatccgctatgacaacatgcacatcccaggaagccccttgcagttctatgtggattacgtcaactgtggccatgtcactgcctatgggcctggcctcacccatggagtagtgaacaagcctgccaccttcaccgtcaacaccaaggatgcaggagaggggggcctgtctctggccattgagggcccgtccaaagcagaaatcagctgcactgacaaccaggatgggacatgcagcgtgtcctacctgcctgtgctgccgggggactacagcattctagtcaagtacaatgaacagcacgtcccaggcagccccttcactgctcgggtcacaggtgacgactccatgcgtatgtcccacctaaaggtcggctctgctgccgacatccccatcaacatctcagagacggatctcagcctgctgacggccactgtggtcccgccctcgggccgggaggagccctgtttgctgaagcggctgcgtaatggccacgtggggatttcattcgtgcccaaggagacgggggagcacctggtgcatgtgaagaaaaatggccagcacgtggccagcagccccatcccggtggtgatcagccagtcggaaattggggatgccagtcgtgttcgggtctctggtcagggccttcacgaaggccacacctttgagcctgcagagtttatcattgatacccgcgatgcaggctatggtgggctcagcctgtccattgagggccccagcaaggtggacatcaacacagaggacctggaggacgggacgtgcagggtcacctactgccccacagagccaggcaactacatcatcaacatcaagtttgccgaccagcacgtgcctggcagccccttctctgtgaaggtgacaggcgagggccgggtgaaagagagcatcacccgcaggcgtcgggctccttcagtggccaacgttggtagtcattgtgacctcagcctgaaaatccctgaaattagcatccaggatatgacagcccaggtgaccagcccatcgggcaagacccatgaggccgagatcgtggaaggggagaaccacacctactgcatccgctttgttcccgctgagatgggcacacacacagtcagcgtcaagtacaagggccagcacgtgcctgggagccccttccagttcaccgtggggcccctaggggaagggggagcccacaaggtccgagctgggggccctggcctggagagagctgaagctggagtgccagccgaattcagtatctggacccgggaagctggtgctggaggcctggccattgctgtcgagggccccagcaaggctgagatctcttttgaggaccgcaaggacggctcctgtggtgtggcttatgtggtccaggagccaggtgactacgaagtctcagtcaagttcaacgaggaacacattcccgacagccccttcgtggtgcctgtggcttctccgtctggcgacgcccgccgcctcactgtttctagccttcaggagtcagggctaaaggtcaaccagccagcctcttttgcagtcagcctgaacggggccaagggggcgatcgatgccaaggtgcacagcccctcaggagccctggaggagtgctatgtcacagaaattgaccaagataagtatgctgtgcgcttcatccctcgggagaatggcgtttacctgattgacgtcaagttcaacggtacccacatccctggaagccccttcaagatccgagttggggagcctgggcatggaggggacccaggcttggtgtctgcttacggagcaggtctggaaggcggtgtcacagggaacccagctgagttcgtcgtgaacacgagcaatgcgggagctggtgccctgtcggtgaccattgacggcccctccaaggtgaagatggattgccaggagtgccctgagggctaccgcgtcacctatacccccatggcacctggcagctacctcatctccatcaagtacggcggcccctaccacattgggggcagccccttcaaggccaaagtcacaggcccccgtctcgtcagcaaccacagcctccacgagacatcatcagtgtttgtagactctctgaccaaggccacctgtgccccccagcatggggccccgggtcctgggcctgctgacgccagcaaggtggtggccaagggcctggggctgagcaaggcctacgtaggccagaagagcagcttcacagtagactgcagcaaagcaggcaacaacatgctgctggtgggggttcatggcccaaggaccccctgcgaggagatcctggtgaagcacgtgggcagccggctctacagcgtgtcctacctgctcaaggacaagggggagtacacactggtggtcaaatgggggcacgagcacatcccaggcagcccctaccgcgttgtggtgccctgagtctggggcccgtgccagccggcagcccccaagcctgccccgctacccaagcagccccgccctcttcccctcaaccccggcccaggccgccctggccgcccgcctgtcactgcagctgcccctgccctgtgccgtgctgcgctcacctgcctccccagccagccgctgacctctcggctttcacttgggcagagggagccatttggtggcgctgcttgtcttctttggttctgggaggggtgagggatgggg

SEQ ID NO: 78 - DNA, 8368 bp, Homo sapiens; identical to SEQ ID NO: 77

SEQ ID NO: 79 - DNA, 1677 bp, Homo sapiens
aggttctcttacatcgaccgcctaagagtcgcgctgtaagaagcaacaacctctcctcttcgtctccgccatcagctcggcagtcgcgaagcagcaaccatgcgtgagtgcatctccatccacgttggccaggctggtgtccagattggcaatgcctgctgggagctctactgcctggaacacggcatccagcccgatggccagatgccaagtgacaagaccattgggggaggagatgattccttcaacaccttcttcagtgagacgggggctggcaagcatgtgccccgggcagtgtttgtagacttggaacccacagtcattgatgaagttcgcactggcacctaccgccagctcttccaccctgagcaacttatcacaggcaaagaagatgctgccaataactatgcccgagggcactacaccattggcaaggagatcattgacctcgtgttggaccgaattcgcaagctggccgaccagtgcacgggtctccagggcttcttggttttccacagctttggtgggggaactggttctgggttcacctcgctgctcatggaacgtctctcagttgattatggcaagaagtccaagctggagttctctatttacccggcgccccaggtttccacagctgtagttgagccctacaactccatcctcaccacccacaccaccctggagcactctgattgtgccttcatggtagacaatgaggccatctatgacatctgtcgtagaaacctcgatattgagcgtccaacctatactaacctgaataggttaataggtcaaattgtgtcctccatcactgcttccctgagatttgatggagccctgaatgttgacctgacagaattccagaccaacctggtgccctatccccgcatccacttccctctggccacatatgcccctgtcatctctgctgagaaagcctaccatgaacagctttctgtagcagagatcaccaatgcttgctttgagccagccaaccagatggtgaaatgtgaccctcgccatggtaaatacatggcttgctgcctgttgtaccgtggtgacgtggttcccaaagatgtcaatgctgccattgccaccatcaagaccaagcgtaccatccagtttgtggattggtgccccactggcttcaaggttggcatcaactaccagcctcccactgtggtgcctggtggagacctggccaaggtacagagagctgtgtgcatgctgagcaacaccacagccattgctgaggcctgggctcgcctggaccacaagtttgacctgatgtatgccaaacgtgcctttgttcactggtacgttggggaggggatggaggaaggtgagttttcagaggcccgtgaggacatggctgcccttgagaaggattatgaggaggttggtgtggattctgttgaaggagagggtgaggaagaaggagaggaatactaaagttaaaacgtcacaaaggtgctgcttttacagggaagcttattctgttttaaacattgaaaagttgtggtctgatcagttaatttgtatgtagcagtgtatgctctcatatacaattactgacctatgctctaaaacatgaatgctttgttacagacccaagctgtccatttctgtgatgggttttgaataaagtattccctgtcttaaaaaaaaaaaaaa

SEQ ID NO: 80 - DNA, 3432 bp, Homo sapiens
actccagcgcgcggctacctacgcttggtgcttgctttctccagccatcggagaccagagccgccccctctgctcgagaaaggggctcagcggcggcggaagcggagggggaccaccgtggagagcgcggtcccagcccggccactgcggatccctgaaaccaaaaagctcctgctgcttctgtaccccgcctgtccctcccagctgcgcagggccccttcgtgggatcatcagcccgaagacagggatggagaggcctctgtgctcccacctctgcagctgcctggctatgctggccctcctgtcccccctgagcctggcacagtatgacagctggccccattaccccgagtacttccagcaaccggctcctgagtatcaccagccccaggcccccgccaacgtggccaagattcagctgcgcctggctgggcagaagaggaagcacagcgagggccgggtggaggtgtactatgatggccagtggggcaccgtgtgcgatgacgacttctccatccacgctgcccacgtcgtctgccgggagctgggctatgtggaggccaagtcctggactgccagctcctcctacggcaagggagaagggcccatctggttagacaatctccactgtactggcaacgaggcgacccttgcagcatgcacctccaatggctggggcgtcactgactgcaagcacacggaggatgtcggtgtggtgtgcagcgacaaaaggattcctgggttcaaatttgacaattcgttgatcaaccagatagagaacctgaatatccaggtggaggacattcggattcgagccatcctctcaacctaccgcaagcgcaccccagtgatggagggctacgtggaggtgaaggagggcaagacctggaagcagatctgtgacaagcactggacggccaagaattcccgcgtggtctgcggcatgtttggcttccctggggagaggacatacaataccaaagtgtacaaaatgtttgcctcacggaggaagcagcgctactggccattctccatggactgcaccggcacagaggcccacatctccagctgcaagctgggcccccaggtgtcactggaccccatgaagaatgtcacctgcgagaatgggctgccggccgtggtgagttgtgtgcctgggcaggtcttcagccctgacggaccctcgagattccggaaagcatacaagccagagcaacccctggtgcgactgagaggcggtgcctacatcggggagggccgcgtggaggtgctcaaaaatggagaatgggggaccgtctgcgacgacaagtgggacctggtgtcggccagtgtggtctgcagagagctgggctttgggagtgccaaagaggcagtcactggctcccgactggggcaagggatcggacccatccacctcaacgagatccagtgcacaggcaatgagaagtccattatagactgcaagttcaatgccgagtctcagggctgcaaccacgaggaggatgctggtgtgagatgcaacacccctgccatgggcttgcagaagaagctgcgcctgaacggcggccgcaatccctacgagggccgagtggaggtgctggtggagagaaacgggtcccttgtgtgggggatggtgtgtggccaaaactggggcatcgtggaggccatggtggtctgccgccagctgggcctgggattcgccagcaacgccttccaggagacctggtattggcacggagatgtcaacagcaacaaagtggtcatgagtggagtgaagtgctcgggaacggagctgtccctggcgcactgccgccacgacggggaggacgtggcctgcccccagggcggagtgcagtacggggccggagttgcctgctcagaaaccgcccctgacctggtcctcaatgcggagatggtgcagcagaccacctacctggaggaccggcccatgttcatgctgcagtgtgccatggaggagaactgcctctcggcctcagccgcgcagaccgaccccaccacgggctaccgccggctcctgcgcttctcctcccagatccacaacaatggccagtccgacttccggcccaagaacggccgccacgcgtggatctggcacgactgtcacaggcactaccacagcatggaggtgttcacccactatgacctgctgaacctcaatggcaccaaggtggcagagggccacaaggccagcttctgcttggaggacacagaatgtgaaggagacatccagaagaattacgagtgtgccaacttcggcgatcagggcatcaccatgggctgctgggacatgtaccgccatgacatcgactgccagtgggttgacatcactgacgtgccccctggagactacctgttccaggttgttattaaccccaacttcgaggttgcagaatccgattactccaacaacatcatgaaatgcaggagccgctatgacggccaccgcatctggatgtacaactgccacataggtggttccttcagcgaagagacggaaaaaaagtttgagcacttcagcgggctcttaaacaaccagctgtccccgcagtaaagaagcctgcgtggtcaactcctgtcttcaggccacaccacatcttccatgggacttccccccaacaactgagtctgaacgaatgccacgtgccctcacccagcccggcccccaccctgtccagacccctacagctgtgtctaagctcaggaggaaagggaccctcccatcattcatggggggctgctacctgacccttggggcctgagaaggccttgggggggtggggtttgtccacagagctgctggagcagcaccaagagccagtcttgaccgggatgaggcccacagacaggttgtcatcagcttgtcccattcaagccaccgagctcaccacagacacagtggagccgcgctcttctccagtgacacgtggacaaatgcgggctcatcagcccccccagagagggtcaggccgaaccccatttctcctcctcttaggtcattttcagcaaacttgaatatctagacctctcttccaatgaaaccctccagtctattatagtcacatagataatggtgccacgtgttttctgatttggtgagctcagacttggtgcttccctctccacaacccccaccccttgtttttcaagatactattattatattttcacagacttttgaagcacaaatttattggcatttaatattggacatctgggcccttggaagtacaaatctaaggaaaaaccaacccactgtgtaagtgactcatcttcctgttgttccaattctgtgggtttttgattcaacggtgctataaccagggtcctgggtgacagggcgctcactgagcaccatgtgtcatcacagacacttacacatacttgaaacttggaataaaagaaagatttatg

SEQ ID NO: 81 - DNA, 2037 bp, Homo sapiens; identical to SEQ ID NO: 4

SEQ ID NO: 82 - DNA, 3874 bp, Homo sapiens
atggctcacctaaagcgactagtaaaattacacattaaaagacattaccataaaaagttctggaagcttggtgcagtaatttttttctttataatagttttggttttaatgcaaagagaagtaagtgttcaatattccaaagaggaatcaaggatggaaaggaacatgaaaaacaaaaacaagatgttggatttaatgctagaagctgtaaacaatattaaggatgccatgccaaaaatgcaaataggagcacctgtcaggcaaaacattgatgctggtgagagaccttgtttgcaaggatattatacagcagcagaattgaagcctgtccttgaccgtccacctcaggattcaaatgcacctggtgcttctggtaaagcattcaagacaaccaatttaagtgttgaagagcaaaaggaaaaggaacgtggggaagctaaacactgctttaatgctttcgcaagtgacaggatttctttgcaccgagatcttggaccagacactcgacctcctgaatgtattgaacaaaaatttaagcgctgccctcccctgcccaccaccagtgtcataatagtttttcataatgaagcgtggtccacgttgcttagaactgtccacagtgtgctctattcttcacctgcaatactgctgaaggaaatcattttggtggatgatgctagtgtagatgagtacttacatgataaactagatgaatatgtaaaacaattttctatagtaaaaatagtcagacaaagagaaagaaaaggtctgatcactgctcggttgctaggagcaacagtcgcaacagctgaaacgctcacatttttagatgctcactgtgagtgtttctatggttggctagaacctctgttggccagaatagctgagaactacacggctgtcgtaagtccagatattgcatccatagatctgaacacgtttgaattcaacaaaccttctccttatggaagtaaccataaccgtggaaattttgactggagtctttcatttggctgggagtcgcttcctgatcatgagaagcaaagaaggaaagatgaaacctacccaattaaaacacccacttttgcaggaggacttttttccatatcaaaagaatattttgagtatattggaagctatgatgaagaaatggaaatctggggaggtgaaaatatagaaatgtctttcagagtatggcaatgtggtgggcagttggagattatgccttgctctgttgttggacatgtttttcgcagcaaaagccctcatagctttccaaaaggcactcaggtgattgctagaaaccaagttcgccttgcagaagtctggatggatgaatacaaggaaatattttataggagaaatacagatgcagcaaaaattgttaaacaaaaagcatttggtgatctttcaaaaagatttgaaataaaacaccgtcttcggtgtaaaaattttacatggtatctgaacaacatttatccagaggtgtatgtgccagaccttaatcctgttatatctggatacattaaaagcgttggtcagcctctatgtctggatgttggagaaaacaatcaaggaggcaaaccattaattatgtatacatgtcatggacttgggggaaaccagtactttgaatactctgctcaacatgaaattcggcacaacatccagaaggaattatgtcttcatgctgctcaaggtctcgttcagctgaaggcatgtacctacaaaggtcacaagacagttgtcactggagagcagatatgggagatccagaaggatcaacttctatacaatccattcttaaaaatgtgcctttcagcaaatggagagcatccaagtttagtgtcatgcaacccatcagatccactccaaaaatggatacttagccaaaatgattaagtgttccttaaaattaagttgaaaaaggaaatattctttctcataaaactgtgactaggcatacactgtagtttttgaaaattatgcaaaagcagctaaatgtaacttattccaagtgcatttttcttatttatatctttatgtagcactactacagaaattctgcaagtttctgtttcaaagcacaataactagtaataccaaagactatttcaaaatgtccagatgtaggggaagagatgtttacagtatgatgaaaataattttccaagtaaagtgatgtttgtgtgttttgtacacttagggatatatatatatagctacattcacacactcacaatttaaaatatttcccctagttttttggggggataggaagaaagatttgttactgtatttttttaactacataaaaatagatcaataaatgtcagcattggcctctgtgtacaaaccaagagcttttacagatccagaatttattagtttaaaatgcaggtgaacttttttttgcgtttggtttacttgtctgtcaaatgtttccttaaacatgaaactgaataaggagaagagtatttttaacacttaaatttcttggcaaattttaaaacattttttagtctgtaatacactccacttgaagcacttaagtcttccttaaatgacttttcttaagtaatgatactgtgtgttttcccaaagcacttttaaaaaaatttttataaattactatctgttgaaaaggtgtccttttcctttcttctagtattttttttcttaccaaaattcactaatcttgaatgtttgtgatattaaatttcaaatgcagaatacttgactcatttaaagctaaattttgttactgattcaattataattgtaatggatttttgactttgtaatggattcttttcatcaaaaagccttattattttttatctatgtggaaaacacaataaaaaatcctcaacactattgtaatcatttggttaagtgcttattcctcttttgggtaaaatctgtaattgataataggtgggggaaaatgaattttgtatgctgaatttctaagcgcctattgtttgtaaaaccatcagatatttcttatggcacaaaaaatgaggaatagcaaaattcctgtgttcaatatttagaaaattttgtattaatttctgataaagttccttaagcatctgatagaatgatgttttaaaaaaatttgacgcttgcttaggagatttaccactttttttttttgtttttcgtcattttatatttagatctcctgtattcttgttcccgaagtaaaatacgatcggtttcatattttaaatctggcagagcctcagctgtacgaaaaagagcatatactggttattgaccctatcttctcattgtttgtttgtaagtttgaatttgtattaaaaagcctgcattctgagctggacatggtggctcagcttctaatcccagcactttggtaggcaaaggtgggaggatcatttgagctcaggagttccagaccagcctgggcaacatagcaaaatctcatctctacaaaaagtaaaaattaaaaaatgaaattaaaaataaaattacctaggtgtggtggcacgcatctgtagttccagctatacaggaaggtgaggcagaagcattgcttgagcttgggagatcgaggctacagtgagctatgattacaccactgcacttcagtctgtgtgactgagcaagactctttcaaaaaaaaaaaaaagcctacattctccagttgattatttccaactaatgtgtattatgtgcctaattttctatcagaagttgtattaagcccgttttcacactgctgttaaagacatacctgagactgggtaatttataaagaaaaataggttcaatggacccacaggtccgcgtggctggggaagcttcacaatcatggcggaaggtgaaagcatgtcttacgtggaag

SEQ ID NO: 83 - DNA, 9416 bp, Homo sapiens
aagcgcgccgcctccccgccctctctcactccccgctcctctccgccgcgcactctcgcggcgctgggagagggcggagggggaggcggcgcgcggcgccagaggaggggggacgcagggggcggagcggagacagtaccttcggagataatcctttctcctgccgcagtggagaggagcggccggagcgagacacttcgccgaggcacagcagccggcaggatggcgaccgtggtggtggaagccaccgagccggagccgtccggcagcatcgccaacccggcggcgtccacctcgcctagcctgtcgcaccgcttccttgacagcaagttctacttgctggtggtcgtcggcgagatcgtgaccgaggagcacctgcggcgtgccatcggcaacatcgagctcggaatccgatcatgggacacaaacctgattgaatgcaacttggaccaagaactcaaactttttgtatctcgacactctgcaagattctctcctgaagtcccaggacaaaagatccttcatcaccgaagtgacgttttagaaacagtggtcctgatcaacccttctgatgaagcagtcagcaccgaggtgcgcttaatgatcactgatgctgcccgacacaagctgctcgtgctgaccgggcagtgctttgaaaataccggagagctcattctccagtccggctctttctccttccagaacttcatagagattttcaccgatcaagagatcggggagttactaagcaccacccatcctgccaacaaagccagcttaaccctgttctgtcctgaagaaggggactggaagaactccaatcttgacagacacaatctccaagacttcatcaatattaaactcaattcagcttctatcttgccagaaatggaaggactttctgagtttaccgagtatctctcagaatcagtggaagtcccatctccctttgacatcttggaacctcccacatcgggtggatttctgaagctctccaagccctgctgttatatttttccaggagggaggggcgattctgccttgtttgcagtgaatggtttcaatatgctcatcaatggcggatcagagagaaaatcctgcttctggaagctcatccgacacttagaccgagtggactccatcctgctcacccacattggggatgacaatttgcctggaataaacagcatgttacagcggaaaattgcagagctcgaggaagaacagtcccagggctccaccacaaatagtgactggatgaaaaacctcatctcccctgacttaggagttgtatttctcaatgtacctgaaaatctcaaaaatccagagccaaacatcaagatgaagagaagcatagaagaagcctgcttcactctccagtacctaaacaaattgtccatgaaaccagaacctctgtttagaagtgtaggcaatactattgatcctgtcattcttttccaaaaaatgggagtaggtaaacttgagatgtatgtgcttaatccagtcaagagcagcaaggaaatgcagtattttatgcagcagtggactggtaccaacaaagacaaggctgaattcattctgcctaatggtcaagaagtagatctcccgatttcctacttaacttcagtctcatctttgattgtgtggcatccagcaaaccctgcggagaaaatcatccgagtcctgtttcctgggaacagcacccagtacaacatcctggaagggttggaaaagctcaaacatctagactttctgaagcagccactggccacccaaaaggatctcactggccaggtgcccactcctgtggtgaaacaaacaaaactgaaacagagggctgatagccgagaaagtctgaagccagccgcaaaaccacttcctagcaaatccgtgcgcaaggagtcaaaagaagaaacccctgaggtcacaaaagtgaatcacgtggaaaagccacccaaagttgaaagcaaagaaaaggtaatggtgaaaaaagacaagccagtaaaaacagagaccaaaccttcagtgactgaaaaggaggttcccagcaaagaagagccatctccagtgaaagccgaggtggctgagaagcaagccacagatgtcaaacccaaagctgccaaggagaagacggtgaaaaaggaaacaaaggtaaagcctgaagacaagaaagaggagaaagaaaagccaaagaaagaagtggctaaaaaggaggacaaaacacctatcaagaaggaggaaaaaccaaaaaaggaagaggtgaaaaaagaagtcaaaaaagagatcaagaaagaagagaaaaaagaacccaagaaagaggttaagaaagaaacaccgccaaaggaagtcaagaaggaagttaagaaggaagagaagaaggaagtgaaaaaggaagaaaaggaacccaaaaaagaaattaagaagctccctaaagacgcaaagaaatcatctactcctctgtctgaagcaaaaaaaccagctgctttaaaaccaaaagtacccaagaaggaagagtctgtcaagaaagattctgttgctgccggaaagccaaaggagaaggggaaaataaaagtcattaagaaggaaggcaaggccgcagaggctgtcgctgcagctgtcggcactggagccaccacagcagctgtcatggcggcagctggaatagcagccattggccctgccaaagaactcgaagctgagaggtcccttatgtcatctcctgaggatctaaccaaggactttgaagagttaaaggctgaagaggtcgatgtaacaaaggacatcaagcctcagctggagctaatcgaagacgaagagaaactgaaggaaactgagccagtcgaagcctacgtcatccagaaggagagagaagtcaccaaaggtcctgccgagtcccctgatgagggaatcactaccactgaaggggagggcgaatgtgaacagacacctgaggagctggagcccgtcgagaagcagggagtagacgacattgaaaaatttgaagatgaaggagccggttttgaagaatcttcagagactggagactatgaagagaaggcagaaactgaggaggctgaggagccagaagaggatggggaggaacacgtatgtgtgagcgcctccaagcacagccccactgaggatgaggaaagtgccaaggcggaggctgatgcatacatcagggagaagagggagtctgtggccagtggggatgaccgagccgaagaagacatggatgaggccattgagaaaggagaggctgaacaatctgaagaggaggctgatgaggaggacaaagctgaagatgccagagaggaggaatatgagccggaaaaaatggaagctgaagactatgtgatggctgtggtcgacaaggctgcagaggctggtggtgccgaggagcagtatggattcctcaccacaccaaccaagcaactaggagcccagtctcctggccgagaacctgcatcttcaattcatgatgagactttacctggaggctcagagagcgaggccaccgcttctgatgaggagaatcgagaagaccagcctgaggaattcactgccacctctggctacactcagtctactattgagatatccagtgagcccacccccatggatgagatgtctacccctcgagacgtgatgagtgatgagaccaacaatgaagagacggagtccccttctcaggaattcgtaaatatcaccaaatatgaatcttcattgtattctcaggaatactctaaacctgctgatgttacaccgctcaacggattttctgaaggatcaaaaacagatgccactgatggcaaggattacaatgcttcagcctctaccatatcaccaccctcttccatggaggaagacaaattcagcagatctgctttacgtgatgcttactgctctgaagtgaaagccagcaccactttggacatcaaagatagcatctcagctgtttcaagtgaaaaggtcagcccatcgaagagcccgtccctgagtccatctccaccatcacccttagaaaagacccccctgggtgaacgtagtgtgaacttctctctgacgcccaatgagattaaagtctctgcagaggcagaagtagccccggtgtctcctgaggtgacccaagaagtagttgaagaacattgtgctagtcctgaggacaagactctggaagtggtgtcaccatctcagtccgtgactggcagtgctggtcacacaccttactatcaatctcctactgacgagaaatccagtcatctccctacagaagtcattgaaaaaccaccagcagttccagtgagttttgaattcagtgatgccaaagatgagaatgaaagggcttcagtaagccccatggatgagcccgtgcctgactcagagtctcctattgaaaaagttttgtctcctttacgcagcccgcccctcattggatccgagtctgcttatgaaagttttctaagtgctgatgacaaggcttctggcagaggtgccgaaagtccttttgaagaaaagagtggaaaacaaggctctccagaccaagtaagtccagtttctgaaatgacttctactagtctttaccaagacaaacaggaagggaaaagcacagactttgcaccaataaaagaagactttggccaagaaaagaaaactgatgatgttgaagccatgagttctcaaccagcactggctctggatgaaaggaaattaggagatgtttctcccacacaaatagatgtcagtcagtttggatcttttaaagaagacactaagatgtccatttctgaaggtactgtctcagacaagtcagctactcctgttgatgagggcgtagcagaagacacgtactctcatatggagggtgtggcctcagtgtccacagcctcagtggctacgagctcatttccagagccaacaacagatgatgtgtctccatctctgcatgctgaggttggctccccacattccacagaagtagatgactccctttcagtgtctgttgtgcaaacacctaccacattccaggaaacagaaatgtctccatctaaagaagaatgcccaagaccgatgtcaatttctccaccagatttctcccctaaaactgcaaagtccaggacacccgttcaagatcacagatctgaacagtcctcaatgtctattgaatttggccaagaatctcctgagcaatcccttgctatggacttcagtcgacagtctccagatcaccctacagtgggtgcaggcgtgcttcacatcactgaaaatgggccaactgaagtggactacagtccttctgacatgcaggactccagtttatcacataagataccacctatggaggagccgtcctacacccaagataatgatctttctgagctcatctcagtatctcaggtagaggcctccccgtccacctcttctgctcataccccttctcagatcgcttctcctctccaagaagatactctatccgatgttgctcctcccagagatatgtccttatatgcctcactcacctctgaaaaagtgcaaagtctggaaggagagaagctctctccaaaatctgatatctctccactcaccccacgagagtcctctcctttatattcacctactttttcagattctacctctgcagtcaaagagaaaacagcaacttgccacagttcctcttctccaccaatagatgcagcatccgcagagccctatggcttccgtgcctcagtgttattcgatacaatgcaacaccatctagccttgaatagagatttgtccacacctggcctggagaaggacagtggagggaagacacctggtgactttagctatgcctatcaaaagcctgaggaaacaaccaggtccccagatgaagaagattatgactatgagtcttatgagaagaccacccggacctcagatgtgggtggctattactatgagaagatagagagaaccacaaaatctccaagtgacagtggctactcctatgagaccattgggaaaactaccaagacccctgaagatggtgactattcctatgaaattattgagaagaccacacggacccctgaagagggtgggtactcatatgacataagtgaaaagaccaccagcccccccgaagtgagtggttacagctatgaaaagactgagaggtctagaaggcttctggatgacatcagcaatggctatgatgactctgaggatggtggccacacacttggggaccccagctactcttatgaaaccactgagaaaattaccagtttccctgagtctgaaggttattcctatgagacatctacaaagacaacacgaacccctgatacttccacatactgttacgagactgcagagaaaatcactagaacccctcaggcatccacatattcctacgagacttcagacctatgctacactgcagaaaagaagtccccctcagaagcccgtcaggatgtcgatttatgcctcgtgtcctcttgtgaatacaagcaccccaagacagagctttcaccctctttcattaatcccaatcctcttgagtggtttgccagtgaagaacccactgaagaatctgaaaagcccctcactcaatcagggggagccccaccgcctccaggaggaaagcaacagggccgacagtgtgatgaaacccctcccacctcagtcagcgagtcagccccatcccagaccgactctgatgttcccccggagactgaagagtgcccctccatcacggccgatgccaatatcgactctgaagacgagtcggaaaccatccccacagacaaaactgtcacgtacaaacacatggacccacctccagctcccgtgcaagaccgcagcccttcgccacgccaccctgatgtgtccatggtggacccagaggccttggccattgagcagaacctgggcaaagctctaaagaaagatctgaaagagaagaccaaaaccaaaaagccaggtacaaagaccaagtcatcttcacctgtcaaaaagagtgatgggaagtctaagcccttggcagcttcaccaaaaccagcgggcttgaaagaatcctcggataaagtgtccagggtggcttctcctaagaagaaagaatctgtggaaaaggcagcaaaacccaccaccactcctgaggtcaaagctgcacgtggggaagagaaagacaaggagaccaagaatgctgccaatgcctctgcatccaagtcggccaagaccgccactgcaggaccaggaactaccaagacgaccaagtcatctgctgtgcccccaggcctccctgtgtatttggacctgtgctacattcctaaccacagcaatagtaagaatgttgatgtggaatttttcaagagagtgcggtcttcctactacgtggtgagtgggaatgaccctgctgctgaggagcccagccgggctgtcctggacgctttgttggaaggaaaggctcagtggggcagcaacatgcaggtgacactgatcccaactcatgactcagaagtgatgagggaatggtaccaggagacccatgagaaacagcaagatctcaacatcatggttttagcaagcagcagcacagtggttatgcaagatgaatccttccctgcatgcaagattgaactgtaaaaaccaaggccagccacaccacaggatctgaactttgtttccagaaattcttcaatttgaaatcaccttttctaaaaagtcaattcatctagttaagtcgctgaacaattacctgccaaatgctatactgtgtcatggtgatgcaagtcactaaatttctcagtttttgctgattgctaagggaaataacagtatttccacaatagggttcaaattcctgcaaaattacctaccccagttcatctctgctgaacatttggaaaccatgcactagccaacccaactgacttctgctaggtagaggcatttgtcttagagagagagagagcgcgggagagagtgagagagagtgagagcacaaagataacgcaggagagagagagagaaagaatgagaaagaaaaggaatgcaagagaaggagatgtaatgacagagagttctggtgagatacccagagagaaaaagagagagcagggtggggtaaggaggagaaaataaaccaacaattaggtctgcattttctcaggcagtaggcattctttagtctacataggcaaagttttccatttttgtcagtctgagtcatcaaaaagagtcttaattttctaaaacaagttggctagaagaaagtaaaaagaacaacacttgttatgagggcatgtgatattttcacatcttaattaagctccttcagtttgaaggctgcacactgacataatgtagtgagtgtagactggccatgcaagtggtttgggccccattcagaactctcagactctaaacacacaagtagattgatctaaggcatgctcccagcatttgtccacccacttagtccactctgagtcgattaacctgcatgcagcaacacccaagtccaccccaattaactgaagcaaataccaaagcagttgggagtacatatggtagacaatttgccttaggaagtgacttgaatgtacaaagatacttgatgcacttattttttaatgtgagacagcaagtttataaaacatccatataggattatagatacttaaaggaacacgtgggtgagcgtgtgtgggggtactagaagctgatctgattggtccaacagtttgatgctgagtcatgcgtgttgaatcccacttcagtgcacctgtggcctctcagtcaaacaagttgtgcctttcacagcttctttactactgcaagttcaagactgaaatggcttctatgatcagaactgggaaaacagtgaatcttatggtggaagaggttctcagcaagtgtacagtatttaccttcctttgtcttacattggctttttaaattttccattaatttcaacataattatgggaacaagtgtacagaagaattttttttttaagatatgtgagaacttttcatagatgaactttttaacaaatgttttcatttacaggaaattgcaaagaaaattctcaagtgatagtctttttttttaagtgtttcgtaagacaaaaattgaataatgttttttgaagttctggcaagattgaagtctgatattgcagtaatgatatttattaaaaacccataactaccaggaataatgatacctcccaccccttgattcccataacataaaagtgctacttgagagtgggggagaatggcatggtaggctacttttcagggccttgacaagtacatcacccagtggtatcctacatacttctttcaagatcttcaaccatgaggtaaaagagccaagttcaaagaaccctagcacaaatttgctttgggattttcttttctgga

SEQ ID NO: 84 - DNA, 1843 bp, Homo sapiens
gggcacgagggcagagccagttcctagcgcagagccgcgcccgccatgagggagatcgtgcacatccaggcgggccagtgcgggaaccagatcggcaccaagttttgggaagtgatcagcgatgagcacggcatcgacccggccggaggctacgtgggagactcggcgctgcagctggagagaatcaacgtctactacaatgagtcatcgtctcagaaatatgtgcccagggccgccctggtggacttagagccaggcaccatggacagcgtgcggtctgggccttttgggcagcttttccggcctgacaacttcatctttggccagacgggtgcagggaacaactgggcgaaagggcactacacggagggcgcggagctggtggacgcagtgctggacgtggtgcggaaggagtgcgagcactgcgactgcctgcagggcttccagctcacgcactcgctgggcggcggcacgggctcaggcatgggcacgctgctcatcagcaagatccgtgaggagttcccggaccgcatcatgaacaccttcagcgtcatgccctcgcccaaggtgtcggacacggtggtggagccctacaatgccacactgtcggtgcaccagctggtggagaatacagacgagacctactgcatcgacaacgaggcgctctatgacatctgcttccgcactctgaagctgacaacgcccacctacggggacctcaaccacctggtgtccgccaccatgagtggggtcaccacctcgctgcgcttcccgggccagctcaatgctgacctgcgcaagctggcggtgaacatggtgcccttcccgcgcctgcacttcttcatgcctggcttcgcgccgctcaccagccgcggcagccagcagtaccgggccctgaccgtgcccgagctcacccagcagatgttcgacgccaggaacatgatggccgcctgcgatccgcgccatggccgctacctgaccgtggccaccgtgttccgcgggcccatgtccatgaaggaggtggacgagcagatgctggccatccagagtaagaacagcagctacttcgtggagtggattcccaacaacgtgaaggtggccgtgtgcgacatcccgccccgcggcctgaagatggcctccaccttcatcggcaacagcacggccatccaggagctgttcaagcgcatctccgagcagttctcagccatgttccggcgcaaggccttcctgcactggttcacgggtgagggcatggatgaaatggagttcaccgaggcggagagcaacatgaacgacctggtatccgagtaccagcagtaccaggatgccaccgccaatgacggggaggaagcttttgaggatgaggaagaggagatcgatggatagtcggaatagagccgccccaactcagatcctacaacacgcaagttccttcttgaaccctggtgcctcctaccctatggccctgaatggtgcactggtttaattgtgttggtgtcggcccctcacaaatgcagccaagtcatgtaattagtcatctggaacaaagactaaaaacagcagagaattgcgggttctacccagtcagaagatcacaccatggagactttctactagaggacttgaaagagaactgaggggccacaaaataaacttcaccttccattaagtgttcaagcatgtctgcaaattaggagggagttagaaacagtctttttcatcctttgtgatgaagcctgaaattgtgccgtgttgccttatatgaatatgcagtatgggactttgaaataatgattcataataaaatactaaacgtgtgtcttcaaaaaaaaaaaaaaaaaaa

SEQ ID NO: 85 - DNA, 1536 bp, Homo sapiens
ggggggggggggaccacttggcctgcctccgtcccgccgcgccacttggcctgcctccgtcccgccgcgccacttcgcctgcctccgtcccccgcccgccgcgccatgcctgtggccggctcggagctgccgcgccggcccttgccccccgccgcacaggagcgggacgccgagccgcgtccgccgcacggggagctgcagtacctggggcagatccaacacatcctccgctgcggcgtcaggaaggacgaccgcacgggcaccggcaccctgtcggtattcggcatgcaggcgcgctacagcctgagagatgaattccctctgctgacaaccaaacgtgtgttctggaagggtgttttggaggagttgctgtggtttatcaagggatccacaaatgctaaagagctgtcttccaagggagtgaaaatctgggatgccaatggatcccgagactttttggacagcctgggattctccaccagagaagaaggggacttgggcccagtttatggcttccagtggaggcattttggggcagaatacagagatatggaatcagattattcaggacagggagttgaccaactgcaaagagtgattgacaccatcaaaaccaaccctgacgacagaagaatcatcatgtgcgcttggaatccaagagatcttcctctgatggcgctgcctccatgccatgccctctgccagttctatgtggtgaacagtgagctgtcctgccagctgtaccagagatcgggagacatgggcctcggtgtgcctttcaacatcgccagctacgccctgctcacgtacatgattgcgcacatcacgggcctgaagccaggtgactttatacacactttgggagatgcacatatttacctgaatcacatcgagccactgaaaattcagcttcagcgagaacccagacctttcccaaagctcaggattcttcgaaaagttgagaaaattgatgacttcaaagctgaagactttcagattgaagggtacaatccgcatccaactattaaaatggaaatggctgtttagggtgctttcaaaggagcttgaaggatattgtcagtctttaggggttgggctggatgccgaggtaaaagttctttttgctctaaaagaaaaaggaactaggtcaaaaatctgtccgtgacctatcagttattaatttttaaggatgttgccactggcaaatgtaactgtgccagttctttccataataaaaggctttgagttaactcactgagggtatctgacaatgctgaggttatgaacaaagtgaggagaatgaaatgtatgtgctcttagcaaaaacatgtatgtgcatttcaatcccacgtacttataaagaaggttggtgaatttcacaagctatttttggaatatttttagaatattttaagaatttcacaagctattccctcaaatctgagggagctgagtaacaccatcgatcatgatgtagagtgtggttatgaactttatagttgttttatatgttgctataataaagaagtgttctgc

SEQ ID NO: 86 - DNA, 2709 bp, Homo sapiens
gggaatagcagaataggagcaagccagcactagtcagctaactaagtgactcaaccaaggccttttttccttgttatctttgcagatacttcattttcttagcgtttctggagattacaacatcctgcggttccgtttctgggaactttactgatttatctcccccctcacacaaataagcattgattcctgcatttctgaagatctcaagatctggactactgttgaaaaaatttccagtgaggctcacttatgtctgtaaagatgggaaaaaaatacaagaacattgttctactaaaaggattagaggtcatcaatgattatcattttagaatggttaagtccttactgagcaacgatttaaaacttaatttaaaaatgagagaagagtatgacaaaattcagattgctgacttgatggaagaaaagttccgaggtgatgctggtttgggcaaactaataaaaattttcgaagatataccaacgcttgaagacctggctgaaactcttaaaaaagaaaagttaaaagtaaaaggaccagccctatcaagaaagaggaagaaggaagtgcatgctacttcacctgcaccctccacaagcagcactgtcaaaactgaaggagcagaggcaactcctggagctcagaaaagaaaaaaatcaaccaaagaaaaggctggacccaaagggagtaaggtgtccgaggaacagactcagcctccctctcctgcaggagccggcatgtccacagccatgggccgttccccatctcccaagacctcattgtcagctccacccaacagttcttcaactgagaacccgaaaacagtggccaaatgtcaggtaactcccagaagaaatgttctccaaaaacgcccagtgatagtgaaggtactgagtacaacaaagccatttgaatatgagaccccagaaatggagaaaaaaataatgtttcatgctacagtggctacacagacacagttcttccatgtgaaggttttaaacaccagcttgaaggagaaattcaatggaaagaaaatcatcatcatatcagattatttggaatatgatagtctcctagaggtcaatgaagaatctactgtatctgaagctggtcctaaccaaacgtttgaggttccaaataaaatcatcaacagagcaaaggaaactctgaagattgatattcttcacaaacaagcttcaggaaatattgtatatggggtatttatgctacataagaaaacagtaaatcagaagaccacaatctacgaaattcaggatgatagaggaaaaatggatgtagtggggacaggacaatgtcacaatatcccctgtgaagaaggagataagctccagcttttctgctttcgacttagaaaaaagaaccagatgtcaaaactgatttcagaaatgcatagttttatccagataaagaaaaaaacaaacccgagaaacaatgaccccaagagcatgaagctaccccaggaacagcgtcagcttccatatccttcagaggccagcacaaccttccctgagagccatcttcggactcctcagatgccaccaacaactccatccagcagtttcttcaccaagaaaagtgaagacacaatctccaaaatgaatgacttcatgaggatgcagatactgaaggaagggagtcattttccaggaccgttcatgaccagcataggcccagctgagagccatccccacactcctcagatgcctccatcaacaccaagcagcagtttcttaaccacgttgaaaccaagactgaagactgaacctgaagaagtttccatagaagacagtgcccagagtgacctcaaagaagtgatggtgctgaacgcaacagaatcatttgtatatgagcccaaagagcagaagaaaatgtttcatgccacagtggcaactgagaatgaagtcttccgagtgaaggtttttaatattgacctaaaggagaagttcaccccaaagaagatcattgccatagcaaattatgtttgccgcaatgggttcctggaggtatatcctttcacacttgtggctgatgtgaatgctgaccgaaacatggagatcccaaaaggattgattagaagtgccagcgtaactcctaaaatcaatcagctttgctcacaaactaaaggaagttttgtgaatggggtgtttgaggtacataagaaaaatgtaaggggtgaattcacttattatgaaatacaagataatacagggaagatggaagtggtggtgcatggacgactgaacacaatcaactgtgaggaaggagataaactgaaactcaccagctttgaattggcaccgaaaagtgggaataccggggagttgagatctgtaattcatagtcacatcaaggtcatcaagaccaggaaaaacaagaaagacatactcaatcctgattcaagtatggaaacttcaccagactttttcttctaaaatctggatgtcattgacgataatgtttatggagataaggtctaagtccctaaaaaaatgtacatatacctggttgaaatacaacactatacatacacaccaccatatatactagctgttaatcctatggaatgggggtattgggagtgcttttttaatttttcatagtttttttttaataaaatggcatattttgcatctacaacttctataataagaaaaaataaataaacattatcttttttgtgaaaaaaa

SEQ ID NO: 87 - DNA, 5431 bp, Homo sapiens
ggcagccgggcgccccgcggggctctccgcgctgcgttcccgacccctggggggaggtgtggagtccaagcggtgcattcttgaaccatcttgtcagacgccggcggctcgcgggctgtggcgggggctgcggtcaaggccgcgctcctgggggccgccgcctgggagggtgggcgcccaggcgtccctgcagccccgggtgctccgactgcgcggcggggccgcggcgcgcgcgcccgggcgtccgggcgtccgggacagtggtgccagacactcccaaatcccgagccggcccagcctcgtacggaggaccttttttttggttctgttggtgacccgttagccgccgctggggcctaacaccaagttgagggctcgcggattagccgcccgccagccgtggaaatgtgataagagcggtaccgtttgcagaaggaaatttctgatgcaactcttcgcctttgctgattgcctctccaaacgcctgcctgacgactgccttggagcatgtgcgttatggaaattaggctttggcgctgaccacaatgctgagcaggaagcagcagctgcaggcccagtgactggtagctcagtgaccagcagcccagtgaccggcagccaggtcctcacctgggtcctctcagtgaagccagggtggccgccccagcagacagtgctacagagccaactcctgacaggttctgaaaatattgtgcacagggcaggctgaggacacagccacgtgatacccactgtagagagagggagagagagacctcctatgcaagctgccggccctctgttccgtagtaaggacaaggtggagcagacacctcgcagtcaacaagacccggcaggaccaggactccccgcacagtctgaccgacttgcgaatcaccaggaggatgatgtggacctggaagccctggtgaacgatatgaatgcatccctggagagcctgtactcggcctgcagcatgcagtcagacacggtgcccctcctgcagaatggccagcatgcccgcagccagcctcgggcttcaggccctcctcggtccatccagccacaggtgtccccgaggcagagggtgcagcgctcccagcctgtgcacatcctcgctgtcaggcgccttcaggaggaagaccagcagtttagaacctcatctctgccggccatccccaatccttttcctgaactctgtggccctgggagccccgctgtgctcacgccgggttctttacctccgagccaggccgccgcaaagcaggatgttaaagtctttagtgaagatgggacaagcaaagtggtggagattctagcagacatgacagccagagacctgtgccaattgctggtttacaaaagtcactgtgtggatgacaacagctggacactagtggagcaccacccgcacctaggattagagaggtgcttggaagaccatgagctggtggtccaggtggagagtaccatggccagtgagagtaaatttctattcaggaagaattacgcaaaatacgagttctttaaaaatcccatgaatttcttcccagaacagatggttacttggtgccagcagtcaaatggcagtcaaacccagcttttgcagaattttctgaactccagtagttgtcctgaaattcaagggtttttgcatgtgaaagagctgggaaagaaatcatggaaaaagctgtatgtgtgtttgcggagatctggcctttattgctccaccaagggaacttcaaaggaacccagacacctgcagctgctggccgacctggaggacagcaacatcttctccctgatcgctggcaggaagcagtacaacgcccctacagaccacgggctctgcataaagccaaacaaagtcaggaatgaaactaaagagctgaggttgctctgtgcagaggacgagcaaaccaggacgtgctggatgacagcgttcagactcctcaagtatggaatgctcctttaccagaattaccgaatccctcagcagaggaaggccttgctgtccccgttctcgacgccagtgcgcagtgtctccgagaactccctcgtggcaatggatttttctgggcaaacaggacgcgtgatagagaatccggcggaggcccagagcgcagccctggaggagggccacgcctggaggaagcgaagcacacggatgaacatcctaggtagccaaagtcccctccacccttctaccctaagtacagtgattcacaggacacagcactggtttcacgggaggatctccagggaggaatcccacaggatcattaaacagcaagggctcgtggatgggctttttctcctccgtgacagccagagtaatccaaaggcatttgtactcacactgtgtcatcaccagaaaattaaaaatttccagatcttaccttgcgaggacgacgggcagacgttcttcagcctagatgacgggaacaccaaattctctgacctgatccagctggttgacttttaccagctgaacaaaggagtcctgccttgcaaactcaagcaccactgcatccgagtggccttatgaccgcagatgtcctctcggctgaagactggaggaagtgaacactggagtgaagaagcggtctgtgcgttggtgaagaacacacatcgattctgcacctggggacccagagcgagatgggtttgttcggtgccagccgaccaagattgactagtttgttggacttaaacgacgatttgctgctgtgaacccagcagggtcgcctccctctgcgtcagccaaattggggagggcatggaagatccagcggaaagttgaaaataaactggaatgatcatcttggcttgggccgcttaggaacaagaaccggagagaagtgattggaaatgaactcttgccctggaataatcttgacaattaaaactgatatgtttactttttttgtattgatcacttttttgcactccttctttgttttcaatattgtattcagcctattgtaggagggggatgtggcgtttcaactcatataatacagaaagagttttgaatgggcagatttcaaactgaatatgggtccccaaatgttcccagagggtcctccacaccctctgccgactaccacggtgtggattcagctcccaaatgacaaacccagcccttcccagtatacttgaaaagctttcttgttaaaataaaaggtgtcactgtggtaggcatttggcatattttgtggactcagtcaagcaaccacagtctgttaatcatttctctatgctcagatgtcagatcctcttgttattagtgtgtcttgttctgcacagtgcaggagactttattcctttggaaaattcactgttccacaaacagcaggctgaatggcctcgcctctagattgacgtgggccagcctccttgagacacacctggcacccgtcatcggccagcggtggatgctgcataatccacctgggtacttcagccttgcgtttccacagccttcagcctgttctagaacgatcactgccttacccctgctgctgcagtggtgtgagtcgtttcacggctgatgtccctcgggggattaaaggatctaaagagaaaatggcacctggttgtcttcgtgctgtgtctcatgggtttccatagtgataaagacaaggaaacgctgcaggggccacaggcacaggctgatatttaaagatctttgcttgcagccctccgtcctgctgaaaacccccataagccagtgaacacagagcagctagaggctcctcctctgctggcttagggtcagaagtacctcacagtggttgtggacatggaagagttttgtcaacacaacactttgtccccgctccgggagatgagtcagatggtggcttgagttgtcacttggtcccctccgcccctcgggtggccccctttgccacgtccccttagcttagtgatcaggtgtgagagtggccatttccttacctttgatccctgtaaagcagaaaggactcctttgacaggcgacaaactactgtggtgagcagaatgatttcctttttcaagacaacacctgcctggcttctattaatgtgtgctggccatgatattgccccaaatccgccccactgaagtgttccctaaggaacagcatttctctgctcctcagtcaacccccgtagcctagagcagtgtcacaagcttcagtaaggccagtcagctggaagtcagtctaccgtatagtaacactgtatttcagtctacagaccacactctagttgttttccatgaaaggtatacaaatgaagaattttctagcaaaacatgtttttaaccatcagtgctcaattgcattttcttcctttcgcagccagtcagtctttcaaactattgacagtaagataattctcacgttcacacctggtggcaggcttcactgtagggacggacattgcagttacaccacgattccttcctcttcactggctcgaggtaaacccttttcaaggaaaaacaactctaggatttcttttttctgtgtacgtagaccagtcccatcagtgtataatctctctctcacacgcctctctccaatagacagcttgtatttgcagtatttcatatttataaatatgcgtttatttaaaaggagaacaaaagcttgactctgattcacagttttgtatgtagctggtttgacgtagtcttttgtattttccctgccgaagtgaattgttggagaatgtaaaccgcctccacgtggcggcagacttcctaaggccccagctcgctggcctcgcgctgggcggctgggaattccacctgagaacaagtcccgcaaaccggggacggaaggacatttgacttttatttttgtatttaattgacatgaatgtaaaggggacagctcagggttgttttggagcctgttgactttgtatctctgcctgtgattttcttttctaaatgaaactccatgtagcaaccaggacgaagttgagaaggaaaacgccaaatgctttggttattagagtttaataggtaagctctgttacactaggtgttagagttccagaatgttcttttgtttgctaaaccttgaagaaacatgtgcctcagcctagatgttttgtcttctcttttctgcacttaatacctgacagtatgaccgatctctgcgcctttctgggggcgggcaagctggcggtagatttgtgatgtcacagtgcaaactgcagtgactgtaaattggcctggcgtgtataaacgttttcagggaatgcagaaggtattaatgaagagacaaaacctttattccatgtgctttgcttcattctgtacatagctctttggctcgtgaacctaattgtaaactttcaggtatttttgtacaaataagggactgatgttctgtttcttgtaattagaaataaacattaatacagtgttcttc

SEQ ID NO: 88 - DNA, 8368 bp, Homo sapiens; identical to SEQ ID NO: 77

SEQ ID NO: 89 - DNA, 7560 bp, Homo sapiens
accggccacagcctgcctactgtcacccgcctctcccgcgcgcagatacacgcccccgcctccgtgggcacaaaggcagcgctgctggggaactcgggggaacgcgcacgtgggaaccgccgcagctccacactccaggtacttcttccaaggacctaggtctctcgcccatcggaaagaaaataattctttcaagaagatcagggacaactgatttgaagtctactctgtgcttctaaatccccaattctgctgaaagtgaatccctagagccctagagccccagcagcacccagccaaacccacctccaccatgggggccatgactcagctgttggcaggtgtctttcttgctttccttgccctcgctaccgaaggtggggtcctcaagaaagtcatccggcacaagcgacagagtggggtgaacgccaccctgccagaagagaaccagccagtggtgtttaaccacgtttacaacatcaagctgccagtgggatcccagtgttcggtggatctggagtcagccagtggggagaaagacctggcaccgccttcagagcccagcgaaagctttcaggagcacacagtagatggggaaaaccagattgtcttcacacatcgcatcaacatcccccgccgggcctgtggctgtgccgcagcccctgatgttaaggagctgctgagcagactggaggagctggagaacctggtgtcttccctgagggagcaatgtactgcaggagcaggctgctgtctccagcctgccacaggccgcttggacaccaggcccttctgtagcggtcggggcaacttcagcactgaaggatgtggctgtgtctgcgaacctggctggaaaggccccaactgctctgagcccgaatgtccaggcaactgtcaccttcgaggccggtgcattgatgggcagtgcatctgtgacgacggcttcacgggcgaggactgcagccagctggcttgccccagcgactgcaatgaccagggcaagtgcgtgaatggagtctgcatctgtttcgaaggctacgccggggctgactgcagccgtgaaatctgcccagtgccctgcagtgaggagcacggcacatgtgtagatggcttgtgtgtgtgccacgatggctttgcaggcgatgactgcaacaagcctctgtgtctcaacaattgctacaaccgtggacgatgcgtggagaatgagtgcgtgtgtgatgagggtttcacgggcgaagactgcagtgagctcatctgccccaatgactgcttcgaccggggccgctgcatcaatggcacctgctactgcgaagaaggcttcacaggtgaagactgcgggaaacccacctgcccacatgcctgccacacccagggccggtgtgaggaggggcagtgtgtatgtgatgagggctttgccggtttggactgcagcgagaagaggtgtcctgctgactgtcacaatcgtggccgctgtgtagacgggcggtgtgagtgtgatgatggtttcactggagctgactgtggggagctcaagtgtcccaatggctgcagtggccatggccgctgtgtcaatgggcagtgtgtgtgtgatgagggctatactggggaggactgcagccagctacggtgccccaatgactgtcacagtcggggccgctgtgtcgagggcaaatgtgtatgtgagcaaggcttcaagggctatgactgcagtgacatgagctgccctaatgactgtcaccagcacggccgctgtgtgaatggcatgtgtgtttgtgatgacggctacacaggggaagactgccgggatcgccaatgccccagggactgcagcaacaggggcctctgtgtggacggacagtgcgtctgtgaggacggcttcaccggccctgactgtgcagaactctcctgtccaaatgactgccatggccagggtcgctgtgtgaatgggcagtgcgtgtgccatgaaggatttatgggcaaagactgcaaggagcaaagatgtcccagtgactgtcatggccagggccgctgcgtggacggccagtgcatctgccacgagggcttcacaggcctggactgtggccagcactcctgccccagtgactgcaacaacttaggacaatgcgtctcgggccgctgcatctgcaacgagggctacagcggagaagactgctcagaggtgtctcctcccaaagacctcgttgtgacagaagtgacggaagagacggtcaacctggcctgggacaatgagatgcgggtcacagagtaccttgtcgtgtacacgcccacccacgagggtggtctggaaatgcagttccgtgtgcctggggaccagacgtccaccatcatccaggagctggagcctggtgtggagtactttatccgtgtatttgccatcctggagaacaagaagagcattcctgtcagcgccagggtggccacgtacttacctgcacctgaaggcctgaaattcaagtccatcaaggagacatctgtggaagtggagtgggatcctctagacattgcttttgaaacctgggagatcatcttccggaatatgaataaagaagatgagggagagatcaccaaaagcctgaggaggccagagacctcttaccggcaaactggtctagctcctgggcaagagtatgagatatctctgcacatagtgaaaaacaatacccggggccctggcctgaagagggtgaccaccacacgcttggatgcccccagccagatcgaggtgaaagatgtcacagacaccactgccttgatcacctggttcaagcccctggctgagatcgatggcattgagctgacctacggcatcaaagacgtgccaggagaccgtaccaccatcgatctcacagaggacgagaaccagtactccatcgggaacctgaagcctgacactgagtacgaggtgtccctcatctcccgcagaggtgacatgtcaagcaacccagccaaagagaccttcacaacaggcctcgatgctcccaggaatcttcgacgtgtttcccagacagataacagcatcaccctggaatggaggaatggcaaggcagctattgacagttacagaattaagtatgcccccatctctggaggggaccacgctgaggttgatgttccaaagagccaacaagccacaaccaaaaccacactcacaggtctgaggccgggaactgaatatgggattggagtttctgctgtgaaggaagacaaggagagcaatccagcgaccatcaacgcagccacagagttggacacgcccaaggaccttcaggtttctgaaactgcagagaccagcctgaccctgctctggaagacaccgttggccaaatttgaccgctaccgcctcaattacagtctccccacaggccagtgggtgggagtgcagcttccaagaaacaccacttcctatgtcctgagaggcctggaaccaggacaggagtacaatgtcctcctgacagccgagaaaggcagacacaagagcaagcccgcacgtgtgaaggcatccactgaacaagcccctgagctggaaaacctcaccgtgactgaggttggctgggatggcctcagactcaactggaccgcggctgaccaggcctatgagcactttatcattcaggtgcaggaggccaacaaggtggaggcagctcggaacctcaccgtgcctggcagccttcgggctgtggacataccgggcctcaaggctgctacgccttatacagtctccatctatggggtgatccagggctatagaacaccagtgctctctgctgaggcctccacaggggaaactcccaatttgggagaggtcgtggtggccgaggtgggctgggatgccctcaaactcaactggactgctccagaaggggcctatgagtactttttcattcaggtgcaggaggctgacacagtagaggcagcccagaacctcaccgtcccaggaggactgaggtccacagacctgcctgggctcaaagcagccactcattataccatcaccatccgcggggtcactcaggacttcagcacaacccctctctctgttgaagtcttgacagaggaggttccagatatgggaaacctcacagtgaccgaggttagctgggatgctctcagactgaactggaccacgccagatggaacctatgaccagtttactattcaggtccaggaggctgaccaggtggaagaggctcacaatctcacggttcctggcagcctgcgttccatggaaatcccaggcctcagggctggcactccttacacagtcaccctgcacggcgaggtcaggggccacagcactcgaccccttgctgtagaggtcgtcacagaggatctcccacagctgggagatttagccgtgtctgaggttggctgggatggcctcagactcaactggaccgcagctgacaatgcctatgagcactttgtcattcaggtgcaggaggtcaacaaagtggaggcagcccagaacctcacgttgcctggcagcctcagggctgtggacatcccgggcctcgaggctgccacgccttatagagtctccatctatggggtgatccggggctatagaacaccagtactctctgctgaggcctccacagccaaagaacctgaaattggaaacttaaatgtttctgacataactcccgagagcttcaatctctcctggatggctaccgatgggatcttcgagacctttaccattgaaattattgattccaataggttgctggagactgtggaatataatatctctggtgctgaacgaactgcccatatctcagggctaccccctagtactgattttattgtctacctctctggacttgctcccagcatccggaccaaaaccatcagtgccacagccacgacagaggccctgccccttctggaaaacctaaccatttccgacattaatccctacgggttcacagtttcctggatggcatcggagaatgcctttgacagctttctagtaacggtggtggattctgggaagctgctggacccccaggaattcacactttcaggaacccagaggaagctggagcttagaggcctcataactggcattggctatgaggttatggtctctggcttcacccaagggcatcaaaccaagcccttgagggctgagattgttacagaagccgaaccggaagttgacaaccttctggtttcagatgccaccccagacggtttccgtctgtcctggacagctgatgaaggggtcttcgacaattttgttctcaaaatcagagataccaaaaagcagtctgagccactggaaataaccctacttgcccccgaacgtaccagggacttaacaggtctcagagaggctactgaatacgaaattgaactctatggaataagcaaaggaaggcgatcccagacagtcagtgctatagcaacaacagccatgggctccccaaaggaagtcattttctcagacatcactgaaaattcggctactgtcagctggagggcacccacggcccaagtggagagcttccggattacctatgtgcccattacaggaggtacaccctccatggtaactgtggacggaaccaagactcagaccaggctggtgaaactcatacctggcgtggagtaccttgtcagcatcatcgccatgaagggctttgaggaaagtgaacctgtctcagggtcattcaccacagctctggatggcccatctggcctggtgacagccaacatcactgactcagaagccttggccaggtggcagccagccattgccactgtggacagttatgtcatctcctacacaggcgagaaagtgccagaaattacacgcacggtgtccgggaacacagtggagtatgctctgaccgacctcgagcctgccacggaatacacactgagaatctttgcagagaaagggccccagaagagctcaaccatcactgccaagttcacaacagacctcgattctccaagagacttgactgctactgaggttcagtcggaaactgccctccttacctggcgacccccccgggcatcagtcaccggttacctgctggtctatgaatcagtggatggcacagtcaaggaagtcattgtgggtccagataccacctcctacagcctggcagacctgagcccatccacccactacacagccaagatccaggcactcaatgggcccctgaggagcaatatgatccagaccatcttcaccacaattggactcctgtaccccttccccaaggactgctcccaagcaatgctgaatggagacacgacctctggcctctacaccatttatctgaatggtgataaggctcaggcgctggaagtcttctgtgacatgacctctgatgggggtggatggattgtgttcctgagacgcaaaaacggacgcgagaacttctaccaaaactggaaggcatatgctgctggatttggggaccgcagagaagaattctggcttgggctggacaacctgaacaaaatcacagcccaggggcagtacgagctccgggtggacctgcgggaccatggggagacagcctttgctgtctatgacaagttcagcgtgggagatgccaagactcgctacaagctgaaggtggaggggtacagtgggacagcaggtgactccatggcctaccacaatggcagatccttctccacctttgacaaggacacagattcagccatcaccaactgtgctctgtcctacaaaggggctttctggtacaggaactgtcaccgtgtcaacctgatggggagatatggggacaataaccacagtcagggcgttaactggttccactggaagggccacgaacactcaatccagtttgctgagatgaagctgagaccaagcaacttcagaaatcttgaaggcaggcgcaaacgggcataaattggagggaccactgggtgagagaggaataaggcggcccagagcgaggaaaggattttaccaaagcatcaatacaaccagcccaaccatcggtccacacctgggcatttggtgagaatcaaagctgaccatggatccctggggccaacggcaacagcatgggcctcacctcctctgtgatttctttctttgcaccaaagacatcagtctccaacatgtttctgttttgttgtttgattcagcaaaaatctcccagtgacaacatcgcaatagttttttacttctcttaggtggctctgggatgggagaggggtaggatgtacaggggtagtttgttttagaaccagccgtattttacatgaagctgtataattaattgtcattatttttgttagcaaagattaaatgtgtcattggaagccatccctttttttacatttcatacaacagaaaccagaaaagcaatactgtttccattttaaggatatgattaatattattaatataataatgatgatgatgatgatgaaaactaaggatttttcaagagatctttctttccaaaacatttctggacagtacctgattgtattttttttttaaataaaagcacaagtacttttgaaaaaaaaccggaattc

SEQ ID NO: 90 - DNA, 2832 bp, Homo sapiens
aggaagctgaaccatctatctccagaaatgtcttcagaaagtaaagagcaacataacgtttcacccagagactcagctgaaggaaatgacagttatccatctgggatccatctggaacttcaaagggaatcaagtactgacttcaagcaatttgagaccaatgatcaatgcagaccttatcataggatccttattgagcgtcaagagaaatcagatacaaacttcaaggagtttgttattaaaaagctgcagaagaattgccagtgcagtccagccaaagccaaaaatatgattttaggtttccttcctgttttgcagtggctcccaaaatacgacctaaagaaaaacattttaggggatgtgatgtcaggcttgattgtgggcatattattggtgccccagtccattgcttattccctgctggctggccaagaacctgtctatggtctgtacacatctttttttgccagcatcatttattttctcttgggtacctcccgtcacatctctgtgggcatttttggagtactgtgccttatgattggtgagacagttgaccgagaactacagaaagctggctatgacaatgcccatagtgctccttccttaggaatggtttcaaatgggagcacattattaaatcatacatcagacaggatatgtgacaaaagttgctatgcaattatggttggcagcactgtaacctttatagctggagtttatcaggtagcgatgggcttctttcaagtgggttttgtttctgtctacctctcagatgccttgctgagtggatttgtcactggtgcctccttcactattcttacatctcaggccaagtatcttcttgggctcaaccttcctcggactaatggtgtgggctcactcatcactacctggatacatgtcttcagaaacatccataagaccaatctctgtgatcttatcaccagccttttgtgccttttggttcttttgccaaccaaagaactcaatgaacacttcaaatccaagcttaaggcaccgattcctattgaacttgttgttgttgtagcagccacattagcctctcattttggaaaactacatgaaaattataattctagtattgctggacatattcccactgggtttatgccacccaaagtaccagaatggaacctaattcctagtgtggctgtagatgcaatagctatttccatcattggttttgctatcactgtatcactttctgagatgtttgccaagaaacatggttacacagtcaaagcaaaccaggaaatgtatgccattggcttttgtaatatcatcccttccttcttccactgttttactactagtgcagctcttgcaaagacattggttaaagaatcaacaggctgccatactcagctttctggtgtggtaacagccctggttcttttgttggtcctcctagtaatagctcctttgttctattcccttcaaaaaagtgtccttggtgtgatcacaattgtaaatctacggggagcccttcgtaaatttagggatcttcccaaaatgtggagtattagtagaatggatacagttatctggtttgttactatgctgtcctctgcactgctaagtactgaaataggcctacttgttggggtttgtttttctatattttgtgtcatcctccgcactcagaagccaaagagttcactgcttggcttggtggaagagtctgaggtctttgaatctgtgtctgcttacaagaaccttcagactaagccaggcatcaagattttccgctttgtagcccctctctactacataaacaaagaatgctttaaatctgctttatacaaacaaactgtcaacccaatcttaataaaggtggcttggaagaaggcagcaaagagaaagatcaaagaaaaagtagtgactcttggtggaatccaggatgaaatgtcagtgcaactttcccatgatcccttggagctgcatactatagtgattgactgcagtgcaattcaatttttagatacagcagggatccacacactgaaagaagttcgcagagattatgaagccattggaatccaggttctgctggctcagtgcaatcccactgtgagggattccctaaccaacggagaatattgcaaaaaggaagaagaaaaccttctcttctatagtgtgtatgaagcgatggcttttgcagaagtatctaaaaatcagaaaggagtatgtgttcccaatggtctgagtcttagtagtgattaattgagaaggtagatagaagaatgtctagccaataggttaaaatttcaagtgtccaacatttcccagttccacagtgggaaattttgcacacttgaaattttaaccaagtggctagatattattcctcctttgaagctaatggcatttgtatatacacactgcagcagagcttgtagctggacagagtcaaaaagaagaaaatacggtttcaggctttcttgcagatatgaagtattcttggaatgcaataagtatgtattgaactgtactgtaaagtagctccaaaacttaattactctcctgttttaggggttatacatttggactgtgcattctccaagagatgaagcggtgaagttgggatttacattggaagtgctgtagacttctttatgtggctcagtggagagagggaaagaatgttgcacctgctctagtaccataggtcaagaggcttctggatcacaaagtcataactagacaggtttgttcttgtagttttctatccccagtctttgctccccagatggcagtagtttttagtaggaaagtgccattcctgtccttaaggcacagtctcatcag

SEQ ID NO: 91 - DNA, 4400 bp, Homo sapiens
acgcggggctcgggtggccgcggcagcagcagcagcaacccccgccgctcgcggtcggcccccgggccgcagccatggtcccgagtggcggcgtcccccagggcctcggcggccgctctgcctgcgcgctgctcctgctctgctacctgaatgttgtaccatctttgggtaggcagactttccctgacgacatcagtgatacccaaagctgagcagagcgtggcttacaaagactttatttattttactgtctttgaaggaaacgttcgcaacgtttctgaagtctcggttgagtatttatgctctcagccttgtgttgtcaatttggaagcagttgtttcatctgagttcagaagtagcattcccgtgtacaaaaaaaggtggaagaatgagaaacatcttcacaccagcaggacacaaatagtacatgtgaaatttccaggcattatggtttacagagatgattatttcatcagacattccatctctgtatctgcagtgatagtacgcgcctggattactcacaaatacagtggcagagactggaatgttaaatgggaggaaaacttgctccatgctgtagcaaagaattataccctcctgcagaccatcccgccttttgaacgccctttcaaagatcatcaagtgtgccttgagtggaacatgggttatatttggaaccttcgggcaaacaggattccacagtgtcctctggaaaatgatgtggttgccctgcttggctttccttatgcctccagtggagaaaacacaggcattgtcaagaagttcccgaggtttcggaaccgagagctggaggccactcgacgccagaggatggattacccagtgtttactgtttcattgtggctttatttactccattattgcaaggccaacctctgtgggattctgtactttgttgactctaatgagatgtacggcacaccttctgtatttcttacggaagagggctatttgcatattcagatgcatcttgtcaaaggggaagaccttgctgtaaaaactaaattcatcatacctttgaaggagtggtttcgactggatatctcttttaacggaggccagatagtagtaaccactagcattggacaggatttgaaaagctaccacaatcagaccattagcttccgggaggatttccattataatgacacagctgggtacttcattattggagggagcaggtatgtggctggcattgaagggttttttggacccctgaagtactatcgccttcgcagtctgcaccccgcccagatttttaatcccctccttgagaagcaacttgctgaacaaatcaagttatattatgaaaggtgtgctgaggttcaagaaatagtatctgtgtatgcatctgcagcaaagcacgggggcgagagacaagaagcatgccacctccacaactcctacctggacctccagcgcaggtatgggagaccctcgatgtgcagagccttcccctgggagaaggagctgaaagacaaacaccccagcttgttccaggcattgctggagatggatctgctgaccgtgccaaggaaccaaaatgaatctgtatcagaaatcggtgggaagatatttgagaaggctgtaaagagactctctagcattgatggtcttcaccaaattagctctatcgtcccctttctgacggattccagctgctgtggataccataaagcatcctactaccttgcagtcttttatgagactggattaaatgttcctcgggatcagctgcagggcatgttgtatagtttggttggaggccaggggagtgagaggctgtcttcaatgaatcttgggtataaacactaccagggtattgacaactaccccctggactgggaactgtcgtatgcctactacagcaacattgccaccaagacaccccttgaccagcacacactgcaaggagatcaggcatatgttgaaacaattagactaaaagatgatgaaatactcaaggtacaaaccaaagaagatggagatgtctttatgtggttgaagcatgaagctacccgaggcaatgcagcagctcagcaacgattggcccagatgctgttctgggggcagcaaggtgtggccaagaatcccgaagcagcaattgagtggtacgccaagggcgccctggagacggaggatcctgcgttaatctatgactatgccattgtgctattcaagggtcaaggagtaaaaaagaacagacggcttgccttagagctgatgaagaaagcagcttccaagggattgcatcaggcagtcaatggcctgggatggtattaccacaaattcaagaaaaattacgccaaagcagcaaagtactggttaaaagcagaagaaatggggaacccagatgcgtcatacaatcttggagtcctgcatttggatggcatcttccctggagttcctggaaggaatcaaactttagctggtgaaattttccataaggctgcgcaaggtggacacatggaagggaccttgtggtgttctctctactatatcacaggcaacctggagacattccctagagatcctgagaaagctgttgtatgggcaaaacatgtagctgagaaaaatggctacttgggccatgtcatccgcaaaggcctcaatgcctacctggaaggttcatggcatgaagctttgctgtattatgttttagcagcagaaactggaattgaagtgtcacagacaaatttagcacacatctgtgaggagaggccagacctggccaggagatacttgggtgttaactgtgtttggagatactataatttctctgtttttcaaatcgatgctccttcctttgcatatttgaagatgggagacctttactactatggccaccaaaaccagtcacaagacctggagttgtctgtgcagatgtacgcccaagccgccctggatggagactcccagggattttttaacctggccctgctaatcgaggaaggtacgataatcccacaccatatcttggatttcttggaaattgactcaactctccattctaataacatctccattctccaggaactgtacgaaaggtgctggagccacagtaacgaggagtccttcagcccctgctccttggcctggctttacctgcacttgcggcttctctggggtgctatcctgcactcagccctgatctactttctgggaacctttctgctatccatattgatcgcctggactgtgcagtatttccagtctgtctcagcaagcgatccccctccaagaccatcccaggcctccccagacactgccacatccactgcaagtccagctgtgactccagctgcagatgcctctgaccaagaccagcccacagtaactaataacccggagccacgtgggtgaactgtgcactccagttctctccagatgagagagaatcttttcaacagctggtattgggaagctggggccagggcatgatcctgataaacaccttaaatgtcttgtcaactggatgcaaattttgcaattggtgtcattttttttaaagtcaaattacaaggaagtacccagatcaggcagtggtaataccaaaggtcatcaaacacatacaaggaacatcttgatcatagggcatgtggggaagtttactgggccatcacagacttttgttctagtgattgtatgtattaggagtcatagcatgccctacggcagatctggattcttatacactaagatgtgtcttaagaatcacagtgcgtgcttcatccctttattgaagaacagaaaattatgactactctacaaggtggataatattttggtacctgtgcttgccacagccctgttcctcaaagctgaattgatagatttctctttgacttccaagacctagcagttataaggcaccttgaaataaattgtttgtgcctggaaatgcagggagggcaatagctttgtaaattggtttacatttttctccttgaatttttctagggtcctagtgcttccgaatcatttaatggcattgtcggatatcttttacatttcaattgcaatccatgaaattacatttagaagattcttagtacttaactgtagtcttctccatgaattacacgttagaatagactggcagcaacggaatatgcagcaagtaagcctctagcttatagtttcatccctacccctcatgcctgcgtgagtctgtacagggatatgtgtgtgtgtgtgtgtgtgtgtgtgttagagaggaagaggaagagcagaatgtctgtatactacatgctgctaaggtagtgaataaatcagtaatgcaatattgtgggtccaaactactctttgcactactttatttacagtagtaaataaaattatttttatacaattgactaccaaaaaaaaaaaaaaaa

SEQ ID NO: 92 - DNA, 2455 bp, Homo sapiens
gaattcgggcgggcttcttcgctgccgacgtacgacgagtggccgggctcttgcgtctggtaacgcgctgtctctaacgccagcgccgtctcgcgcgcactgcgcacagaccacccgcagacgcccggcagtccgcaggcccaaacgcgcacgcgaccccgctctccgcaccgtacccggccgcctcggcatggcgccccgcagcgcccggcgacccctgctgctgctactgcctgttgctgctgctcggcctcatgcattgtcgtcagcagccatgtttatggtgaaaaatggcaacgggaccgcgtgcataatggccaacttctctgctgccttctcagtgaactacgacaccaagagtggccccaagaacatgacctttgacctgccatcagatgccacagtggtgctcaaccgcagctcctgtggaaaagagaacacttctgaccccagtctcgtgattgcttttggaagaggacatacactcactctcaatttcacgagaaatgcaacacgttacagcgttcagctcatgagttttgtttataacttgtcagacacacaccttttccccaatgcgagctccaaagaaatcaagactgtggaatctataactgacatcagggcagatatagataaaaaatacagatgtgttagtggcacccaggtccacatgaacaacgtgaccgtaacgctccatgatgccaccatccaggcgtacctttccaacagcagcttcagcaggggagagacacgctgtgaacaagacaggccttccccaaccacagcgccccctgcgccacccagcccctcgccctcacccgtgcccaagagcccctctgtggacaagtacaacgtgagcggcaccaacgggacctgcctgctggccagcatggggctgcagctgaacctcacctatgagaggaaggacaacacgacggtgacaaggcttctcaacatcaaccccaacaagacctcggccagcgggagctgcggcgcccacctggtgactctggagctgcacagcgagggcaccaccgtcctgctcttccagttcgggatgaatgcaagttctagccggtttttcctacaaggaatccagttgaatacaattcttcctgacgccagagaccctgcctttaaagctgccaacggctccctgcgagcgctgcaggccacagtcggcaattcctacaagtgcaacgcggaggagcacgtccgtgtcacgaaggcgttttcagtcaatatattcaaagtgtgggtccaggctttcaaggtggaaggtggccagtttggctctgtggaggagtgtctgctggacgagaacagcacgctgatccccatcgctgtgggtggtgccctggcggggctggtcctcatcgtcctcatcgcctacctcgtcggcaggaagaggagtcacgcaggctaccagactatctagcctggtgcacgcaggcacagcagctgcaggggcctctgttcctttctctgggcttagggtcctgtcgaaggggaggcacactttctgcaaacgtttctcaaatctgcttcatccaatgtgaagttcatcttgcagcatttactatgcacaacagagtaactatcgaaatgacggtgttaattttgctaactgggttaaatattttgctaactggttaaacattaatatttaccaaagtaggattttgagggtgggggtgctctctctgagggggtgggggtgccgctgtctctgaggggtgggggtgccgctgtctgaggggtgggggtgccgctctctctgagggggtgggggtgccgctttctctgagggggtgggggtgccgctctctctgagggggtgggggtgctgctctctccgaggggtggaatgccgctgtctctgaggggtgggggtgccgctctaaattggctccatatcattgagtttagggttctggtgtttggtttcttcattctttactgcactcagatttaagccttacaaagggaaacctctggccgtcacacgtaggacgcatgaaggtcactcgtgtgaggctgacatgctcacacattacaacagtagagagggaaaatcctaagacagaggaactccagagatgagtgtctggagcggcttcagttcagctttaaaggccaggacgcgcgacacgtggctggcggcctcgttccagtggcggcacgtccttggcgtctctaatgtctgcagctcaagggctggcacttttttaaatataaaaatggtgttatttttatttttttttgtaaagtgatttttggtcttctgttgacattcgggtgatcctgttctgcgctgtgtacaatgtgagatcggtgcgttctcctgatgttttgccgtggcttggggattgtacacgggaccagctcacgtaatgcattgcctgtaacaatgtaataaaaagcctctttctttcaaaaaaaccccgaattc

SEQ ID NO: 93 - DNA, 4459 bp, Homo sapiens
gtttctctctctccttctctctctctctctctctctcttttttttccgccctagctggggctgtgttggaggagaggaagaaagagagacagaggattgcattcatccgttacgttcttgaaatttcctaatagcaagaccagcgaagcggttgcacccttttcaatcttgcaaaggaaaaaaacaaaacaaaacaaaaaaaacccaagtccccttcccggcagtttttgccttaaagctgccctcttgaaattaattttttcccaggagagagatgtcttatcaggggaagaaaaatattccacgcatcacgagcgatcgtcttctgatcaaaggaggtaaaattgttaatgatgaccagtcgttctatgcagacatatacatggaagatgggttgatcaagcaaataggagaaaatctgattgtgccaggaggagtgaagaccatcgaggcccactcccggatggtgatccccggaggaattgacgtccacactcgtttccagatgcctgatcagggaatgacgtctgctgatgatttcttccaaggaaccaaggcggccctggctgggggaaccactatgatcattgaccacgttgttcctgagcctgggacaagcctgctcgctgcctttgaccagtggagggaatgggccgacagcaagtcctgctgtgactactctctgcatgtggacatcagcgagtggcataagggcatccaggaggagatggaagcgcttgtgaaggatcacggggtaaattccttcctcgtgtacatggctttcaaagatcgcttccagctaacggattgccagatttatgaagtactgagtgtgatccgggatattggcgccatagcccaagtccacgcagaaaatggcgacatcattgcagaggagcagcagaggatcctggatctgggcatcacgggccccgagggacatgtgctgagccgacctgaggaggtcgaggccgaagccgtgaatcgtgccatcaccatcgccaaccagaccaactgcccgctgtatatcaccaaggtgatgagcaaaagctctgctgaggtcatcgcccaggcacggaagaagggaactgtggtgtatggcgagcccatcactgccagcttgggaacggacggctcccattactggagcaagaactgggccaaggctgctgcctttgtcacctccccacccttgagccctgatccaaccactccagactttctcaactccttgctgtcctgtggagacctccaggtcacgggcagtgcccattgcacgtttaacactgcccagaaggctgtaggaaaggacaacttcaccctgattccggagggcaccaatggcactgaggagcggatgtccgtcatctgggacaaggctgtggtcactgggaagatggatgagaaccagtttgtggctgtgaccagcaccaatgcagccaaagtcttcaacctttacccccggaaaggccgcattgctgtgggatccgatgccgacctggtcatctgggaccccgacagcgttaaaaccatctctgccaagacacacaacagctctctcgagtacaacatctttgaaggcatggagtgccgcggctccccactggtggtcatcagccaggggaagattgtcctggaggacggcaccctgcatgtcaccgaaggctctggacgctacattccccggaagcccttccctgattttgtttacaagcgtatcaaggcaaggagcaggctggctgagctgagaggggttcctcgtggcctgtatgacggacctgtgtgtgaagtgtctgtgacgcccaagacagtcactccagcctcctcggccaagacgtctcctgccaagcagcaggccccacctgtccggaacctgcaccagtctggattcagtttgtctggtgctcagattgatgacaacattccccgccgcaccacccagcgtatcgtggcgccccccggtggccgtgccaacatcaccagcctgggctagagctcctgggctgtgcgtccactggggactggggatgggacacctgaggacattctgagacttctttcttccttcctttttttttttttgtttttttttttaagagcctgtgatagttactgtggagcagccagttcatggggtcccccttggggccccacaccccgtctctcaccaagagttactgattttgctcatccacttccctacacatctatgggtatcacacccaagactacccaccaagctcatacagggaaccacacccaacacttagacatgcgaacaagcagcccccagcgagggtctccttcgccttcaacctcctagtgtctgttagcatcttccttttcatggggggagggaagataaagtgaattgcccagagctgcctttttcttttctttttaaaaattttaagaagttttccttgtggggctggggaggggccggggtcagggagagtctttttttttttttttttaaatactaaattggaacatttaattccatattaatacaaggggtttgaactggacatcctaatgatgcaattacgtcatcacccagctgattccgggtggttggcaaactcatcgtgtctgtcctgagaggctccacaatgcccacccgcatcgccattctgtagtcttcagggtcagctgttgataaaggggcaggcttgcgttattggcctagattttgctgcagattaaatcctttgaggattctcttctcttttaccatttttctgcgtgctctcactctctctttctctctctagctttttaattcatgaatattttcgtgtctgtctctctctctctctgtgtttcctccagcccttgtctcggagacggtgttttcctcccttgccccattatcttttcacctcccaggtctaccatttcatggtggtcgttgggtccgcctaaaggatttgagcgtttgccattgcaagcatagtgctgtgtcatcctggtccatgtaggactggtgctaaccacctgccatcatgaggatgtgtgctagagtgtgggaccctggccaagtgcaggaatgggccatgccgtctcacccacagtatcacacgtggaaccgcagacagggcccagaagctttagaggtatgaggctgcagaaccggagagattttcctctgtgcagtgctctctggctaaagtcacggtcaaacctaaacaccgagcctcattaacccaagtgaaccaaccaaagtcaccagttcagaagtgctaagctaataggagtctgacccgagggcctgctgcttcctggttaagtatcttttgagattctagaacacatgggagctttttattttcggggaaaaaccgtatttttttcttgtccaattatttctaaagacacactacatagaaagaggccctataaactcaaaaagtcattgggaaacttaaagtctattctactttgcaagaggagaaatgtgttttatgaacgatagatcacatcagaactcctgtggggaggaaaccttataaattaaacacatggcccccttagagaccacaggtgatgtctgtctccatccttccctctccttttctgtcacctttccccctagctggctcctttggacctacccctgtccttgctgacttgtgttgcattgtattccaaacgtgtttacaggttctcttaagcaatgttgtatttgcaggcttttctgaataccaaatctgctttttgtaaagcgtaaaaacatcacaaagtaggtcattccatcaccacccttgtctctctacacattttgcctttggggatctggttggggttttgggttttttgttgttgttgtttatttgttattttaaaggtaaattgcacttttaaaaaaataattggttgacttaatatatttgctttttttctcacctgcacttagaggaaatttgaacaagttggaaaaaaacaatttttgtttcaattctaagaaacacttgcagctctagtattcacttgagtcttcctgtttttcctgtaccgggtcatggtaatttttggttgttttggttgttttcttaaaaaacaagttaaaacctgacgatttctgcaggctgtgtaagcatgtttacctgttggcttgctttgtgtgtctgttaaatgaatgtcatatgtaaatgctaaaataaatcgacagtgtctcagaactgaataactgcagtgacttgatgctctaaaacagtgtaggatttaagaatagatggtttttaatcctggaaattgtgattgtgacccatgagtggaggaactttcagttctaaagctgataaagtgtgtagccagaagagtacttttttttttgtaaccactgtcttgatggcaaaataattatggtaaaaaacaagtctcgtgtttattattccttaagaactctgtgttatattaccatggaacgcctaataaagcaaaatgtggttgtttc

SEQ ID NO: 94 - DNA, 2709 bp, Homo sapiens; identical to SEQ ID NO: 86

SEQ ID NO: 95 - DNA, 3052 bp, Homo sapiens
catttcaggccccggacaggaggcagtgccgcttcggccgaaggcccgagcgcccgaggcgtctgggatggtgtgggaccggcaaaccaagatggagtatgagtggaaacctgacgagcaagggcttcagcaaatcctgcagctgttgaaggagtcccagtccccagacaccaccatccagagaaccgtgcaacaaaaactggaacaacttaatcagtatccagactttaacaactacttgatttttgttcttacaaaattaaaatctgaagatgaacccacaagatcattgagtggtcttatcttgaagaataatgtgaaagcacactttcagaacttcccaaatggtgtaacagactttattaaaagtgaatgtttaaataatattggtgactcctctcctctgattagagccactgttggtattttgatcacaactatagcctccaagggagaattgcagaattggcctgacctcttaccaaaactctgtagcctgttggattctgaagattataatacctgtgagggagcatttggtgcccttcagaagatttgtgaagattctgctgagattttagacagtgatgttttagatcgtcctctcaacatcatgattcccaaatttttacagttcttcaagcatagtagtccaaaaataaggtctcacgctgttgcatgtgtcaatcagtttatcatcagtaggactcaagctctaatgttgcacattgattcttttattgagaatctctttgcattagctggtgatgaagaaccagaggtacggaaaaatgtgtgccgagcacttgtgatgttgctcgaagttcgaatggatcgcctgcttcctcacatgcataatatagttgagtacatgctacagaggactcaagatcaagatgaaaatgtggctttagaagcctgtgaattttggctaactttagctgaacagccaatatgcaaagatgtactcgtaaggcatcttcctaagttgattcctgtgttagtgaatggcatgaagtactcagacatagatattatcctacttaagggtgatgttgaagaagacgaaacgattcctgatagtgaacaggatatacggccacgttttcaccgatcgaggacggtggctcagcagcatgatgaagatggaattgaagaggaagatgatgatgatgatgaaattgatgatgatgatacaatttctgactggaatctaagaaaatgttctgctgctgccctggatgttcttgcaaatgtgtatcgtgatgaactgctgccacatattttgccccttttgaaagaattactttttcatcatgaatgggttgttaaagaatcaggcattttggttttaggagcaattgctgaaggttgcatgcagggcatgattccatacttgcctgagcttattcctcaccttattcagtgcctctctgataaaaaggctcttgtgcgttccataacatgctggactcttagccgctatgcacactgggtggtcagccagccgccagacacgtacctgaagccattaatgacagaattgctaaagcgcatcctggacagcaacaagagagtacaagaagctgcctgcagtgcctttgctaccctagaagaggaggcttgtacagaacttgttccttaccttgcttatatacttgataccctggtctttgcatttagtaaataccagcataagaacctgctcattctttacgatgccataggaacattagcagattcagtaggacatcatttaaacaaaccagaatatattcagatgctaatgcctccactgatccagaaatggaacatgttaaaggatgaagataaagatctcttccctttacttgagtgcctatcttcagttgccacagcactgcagtctggattccttccgtactgtgaacctgtgtatcagcgttgtgtaaacctagtacagaagactcttgcacaagccatgctaaacaatgctcaaccagatcaatatgaagctccagataaagattttatgatagtggctcttgatttactgagtggcctggctgaaggacttggaggcaacattgaacagctggtagcccgaagtaacatcctgacactaatgtatcagtgcatgcaggataaaatgccagaagttcgacagagttcttttgccctgttaggtgacctcacaaaagcttgctttcagcatgttaagccttgtatagctgatttcatgccaatattgggaaccaacctaaatccagaattcatttcagtctgcaacaatgccacatgggcaattggagaaatctccattcaaatgggtatagagatgcagccttatattcctatggtgttgcaccagcttgtagaaatcattaacagacccaacacaccaaagacgttgttagagaatacagcaataacaattggtcgtcttggttacgtttgtcctcaagaggtggcccccatgctacagcagtttataagaccctggtgcacctctctgagaaacataagagacaatgaggaaaaggattcagcattccgtggaatttgtaccatgatcagtgtgaatcccagtggcgtaatccaagattttatatttttttgtgatgccgttgcatcatggattaacccaaaagatgatctcagagacatgttctgtaagatccttcatggatttaaaaatcaagttggcgatgaaaattggaggcgtttctctgaccagtttcctcttcccttaaaagagcgtcttgcagctttttatggtgtttaatctaatacacttaagctgcagtcccaaaattaggggtccttcagtcttggagactataagggagcctctgcacccagggaaaatgttaccctttacaggggggaagggtaaaccagtagggaatacagtacaatcccaaccctactgggaggggcgggagggaggtgttgccgtcactgtattaagtcgatgttgggaaacgttttaacatctggagcctttgtgggtggaaatatgtctccagttacaactccgcagtggatgtgaagaagcaaaaaaaaaaaaaaa

SEQ ID NO: 96 - DNA, 2483 bp, Homo sapiens
ccccctcggccccgcgcgtcgcctgtcctccgagccagtcgctgacagccgcggcgccgcgagcttctcctctcctcacgaccgaggcagagcagtcattatggcgaaccttggctgctggatgctggttctctttgtggccacatggagtgacctgggcctctgcaagaagcgcccgaagcctggaggatggaacactgggggcagccgatacccggggcagggcagccctggaggcaaccgctacccacctcagggcggtggtggctgggggcagcctcatggtggtggctgggggcagcctcatggtggtggctgggggcagccccatggtggtggctggggacagcctcatggtggtggctggggtcaaggaggtggcacccacagtcagtggaacaagccgagtaagccaaaaaccaacatgaagcacatggctggtgctgcagcagctggggcagtggtggggggccttggcggctacatgctgggaagtgccatgagcaggcccatcatacatttcggcagtgactatgaggaccgttactatcgtgaaaacatgcaccgttaccccaaccaagtgtactacaggcccatggatgagtacagcaaccagaacaactttgtgcacgactgcgtcaatatcacaatcaagcagcacacggtcaccacaaccaccaagggggagaacttcaccgagaccgacgttaagatgatggagcgcgtggttgagcagatgtgtatcacccagtacgagagggaatctcaggcctattaccagagaggatcgagcatggtcctcttctcctctccacctgtgatcctcctgatctctttcctcatcttcctgatagtgggatgaggaaggtcttcctgttttcaccatctttctaatctttttccagcttgagggaggcggtatccacctgcagcccttttagtggtggtgtctcactctttcttctctctttgtcccggataggctaatcaatacccttggcactgatgggcactggaaaacatagagtagacctgagatgctggtcaagccccctttgattgagttcatcatgagccgttgctaatgccaggccagtaaaagtataacagcaaataaccattggttaatctggacttatttttggacttagtgcaacaggttgaggctaaaacaaatctcagaacagtctgaaatacctttgcctggatacctctggctccttcagcagctagagctcagtatactaatgccctatcttagtagagatttcatagctatttagagatattttccattttaagaaaacccgacaacatttctgccaggtttgttaggaggccacatgatacttattcaaaaaaatcctagagattcttagctcttgggatgcaggctcagcccgctggagcatgagctctgtgtgtaccgagaactggggtgatgttttacttttcacagtatgggctacacagcagctgttcaacaagagtaaatattgtcacaacactgaacctctggctagaggacatattcacagtgaacataactgtaacatatatgaaaggcttctgggacttgaaatcaaatgtttgggaatggtgcccttggaggcaacctcccattttagatgtttaaaggaccctatatgtggcattcctttctttaaactataggtaattaaggcagctgaaaagtaaattgccttctagacactgaaggcaaatctcctttgtccatttacctggaaaccagaatgattttgacatacaggagagctgcagttgtgaaagcaccatcatcatagaggatgatgtaattaaaaaatggtcagtgtgcaaagaaaagaactgcttgcatttctttatttctgtctcataattgtcaaaaaccagaattaggtcaagttcatagtttctgtaattggcttttgaatcaaagaatagggagacaatctaaaaaatatcttaggttggagatgacagaaatatgattgatttgaagtggaaaaagaaattctgttaatgttaattaaagtaaaattattccctgaattgtttgatattgtcacctagcagatatgtattacttttctgcaatgttattattggcttgcactttgtgagtattctatgtaaaaatatatatgtatataaaatatatattgcataggacagacttaggagttttgtttagagcagttaacatctgaagtgtctaatgcattaacttttgtaaggtactgaatacttaatatgtgggaaacccttttgcgtggtccttaggcttacaatgtgcactgaatcgtttcatgtaagaatccaaagtggacaccattaacaggtctttgaaatatgcatgtactttatattttctatatttgtaactttgcatgttcttgttttgttatataaaaaaattgtaaatgtttaatatctgactgaaattaaacgagcgaagatgagcaccaaaaaaaaaaaaaaaa

SEQ ID NO: 97 - DNA, 4925 bp, Homo sapiens
gaagcggcgggcggggtggagcagccagctgggtccggggagcgccgccgccgcctcgatggggtgttgaaaagtctcctctagagctttggaaggctgaatgcactaaacatgaagagcttgaaagcgaagttcaggaagagtgacaccaatgagtggaacaagaatgatgaccggctactgcaggccgtggagaatggagatgcggagaaggtggcctcactgctcggcaagaagggggccagtgccaccaaacacgacagtgagggcaagaccgctttccatcttgctgctgcaaaaggacacgtggaatgcctcagggtcatgattacacatggtgtggatgtgacagcccaagatactaccggacacagcgccttacatctcgcagccaagaacagccaccatgaatgcatcaggaggctgcttcagtctaaatgcccagccgaaagtgtcgacagctctgggaaaacagctttacattatgcagcggctcagggctgccttcaagctgtgcagattctctgcgaacacaagagccccataaacctcaaagatttggatgggaatataccgctgcttcttgctgtacaaaatggtcacagtgagatctgtcactttctcctggatcatggagcagatgtcaattccaggaacaaaagtggaagaactgctctcatgctggcctgtgagattggcagctctaacgctgtggaagccttaattaaaaagggtgcagacctaaaccttgtagattctcttggatacaatgccttacattattccaaactctcagaaaatgcaggaattcaaagccttctattatcaaaaatctctcaggatgctgatttaaagaccccaacaaaaccaaagcagcatgaccaagtctctaaaataagctcagaaagaagtggaactccaaaaacacgcaaagctccaccacctcctatcagtcctacccagttgagtgatgtctcttccccaagatcaataacttcgactccactatcgggaaaggaatcggtattttttgctgaaccacccttcaaggctgagatcagttctatacgagaaaacaaagacagactaagtgacagtactacaggtgctgatagcttattggatataagttctgaagctgaccaacaagatcttctctctctattgcaagcaaaagttgcttcccttaccttacacaataaggagttacaagataaattacaggccaaatcacccaaggaggcggaagcagacctaagctttgactcataccattccacccaaactgacttgggcccatccctgggaaaacctggtgaaacctctcccccagactccaaatcatctccatctgtcttaatacattctttaggtaaatccactactgacaatgatgtcagaattcagcaactgcaagagattttgcaagatctacagaagagattagagagctctgaagcagagagaaaacagctacaggtcgaactccaatcccgaagggcagaactggtatgcttaaacaacactgagatttcagagaacagctctgacctcagccagaaacttaaagaaactcagagcaaatacgaggaggctatgaaagaagtccttagtgtgcagaagcagatgaaactcggtcttgtctcacctgaaagcatggataattattcacatttccacgagctgagggtcacggaagaggaaataaatgtgctaaagcaggatctgcagaatgcattagaagaaagtgaaagaaataaagagaaagtgagagagttagaggaaaaactggtagagagggagaaaggtacagtgattaagccacctgtggaagagtacgaggaaatgaaaagttcatattgctctgttattgagaatatgaataaggagaaagcatttttgtttgagaaataccaagaagcccaagaagaaatcatgaaattaaaagacacactaaaaagtcagatgacacaggaagccagtgatgaagctgaggacatgaaagaagccatgaataggatgatagatgaactcaataaacaggtgagcgagctgtcacagctgtacaaagaagcccaggctgagctggaggattacaggaagaggaaatctctagaggatgtcacagctgaatatatccataaagcagagcatgagaaactgatgcaattgacaaacgtgtccagggctaaagcagaagatgcactgtctgaaatgaagtctcagtattcaaaagtgttgaatgagttgacccagctcaaacaactggtggatgcacaaaaagagaactctgtctctatcacagaacatttgcaagtgataaccacgctgcggactgcagcaaaagagatggaagaaaaaataagcaatcttaaggaacaccttgcaagcaaggaagtggaagtagcaaagctggagaaacaactcttagaagagaaagctgctatgactgatgcaatggtacctcggtcttcctatgaaaaactccagtcatccttagagagtgaagtgagtgtgttggcatcgaaattaaaggaatctgtgaaagagaaagagaaggtccattcagaggttgtccagattagaagtgaggtctcacaggtgaaaagagaaaaggaaaatattcagactctcttgaaatccaaagagcaagaagtaaatgaacttctgcaaaaattccagcaagctcaggaagaacttgcagaaatgaaaagatacgctgagagctcttcaaaactggaggaagataaagataaaaagataaatgagatgtcgaaggaagtcaccaaattgaaggaggccttgaacagcctctcccagctctcctactcaacaagctcatccaaaaggcagagtcagcagctggaggcgctgcagcagcaagtcaaacagctccagaaccagctggcggaatgcaagaaacaacaccaggaggtcatatcagtttacagaatgcatcttctgtatgctgtgcagggccagatggatgaagatgtccagaaagtactgaagcaaatccttaccatgtgtaaaaaccagtctcaaaagaagtaaagtggattccttggcaggacactgccccttgtcatctgtctttgtgttagatccagagttgtcggcagccgctgccattgttctcattcgtggtatgcactgtggcctagcgtagcttcttccctttccaaaggtttctgaggacttctcccaggagaagactgcccgcctcagaactgcttagagacttcaaaccagcagaggtgaaagtccctgtcatcccttcagattccagagctgggatcagccatgcccagaggtctggtcctgatgctggcaggggggccccctcctccatccctgactggctgagtggctttatcaccaccgagtgatgtgctgaggcctcctgcagtgaatgctccttccattcctgtactcgggcagtgccattcagcacaggagagctctttttgcctttggctttcaattccaaaacatgatttaatttctaactaaattagtatggcactagttatgaagtatctgcttaaaacccttcatcatgatatcctgtggatttaaaaactctaattccatgttttcttcccatctgccttatatatctcatcaccctgcttatcaatattcagtttgatgagcactattaactaaaatatgaaacttaaaaacaaaagcaagttgtccttaaaagttctttttttaagtaaattgttgacatactgcaaattttctatgcaaacttgcctcctgctgttatctgtgaagctcaggaaatccaaacatttgtgtttcaacaagggacagtaaactgtgtgtttacagccaaaagaaatgcctcatagttcttaacctcaacttttgtagaagtatttttttctctgtaatatttttattggctcataaagatgttttcatatctgaactcctaaataagtgaaattacagtagattatattaacaaaatactttttaggtagccatgcttgagactttttaaaaatataactttttccttaaagttttcagctatagcaaaaggtagttatgtatgccagacctaatatgagctgccaccaacacccctagaactttcagccatggtgtcttcagaattgtagcgcatttctgaatctagcaaatcctccttttacccgttgaatgttttgaatgccctgactctaccagcgcccataaatgatctctagaaggactgttagtaccaatctgtttttcaactttgaagctaaaaaccctgatatggtaatattatggtgcatagcagaggtctcggaaaaaaaatatttctgttcactttactttcaggttaaaaatgtttctaacacgcttgcaacttcccttatggcattaatcttgttgagggagagagacagaatcctggactctccaaagtatttaactgaaagtagggcctgctctgacagggcccatgtcccacaaggctgcttggcctcagtgggtgcttggctgtgctggatgatatgttgatctgtattggataaggaccaatgacagcaaagcaaaaatggctttaaagcttggtgttacttttcttaagttgtttaattatagttaagcaatttcaaaaatgctccaaagaaatgtgaaaggaccttttgtcacagcacttcagaaaatacacaacagccccttctgcccccgcacagaaatgctgcagagtatataaaacttgagacatttttgtaggatgcctgacgaggtgtagccttttatcttgtttccggatgcatatttattacgagtactctggttaaatattgaaaagttatatgctgtagtttttagtattttgtctttgtaatttacagaagttattggagaaaataaacttgtttcattttgcaaaaaaaaaaaaaaaaaaaaaaaaa

SEQ ID NO: 98 - DNA, 5896 bp, Homo sapiens; identical to SEQ ID NO: 22

SEQ ID NO: 99 - DNA, 4318 bp, Homo sapiens
aagcggctcgggctgcggctggctcagagtgccgcggggggcgtggggcggtgctgaggagctgaagccgtggccagctcgactccggacagtccagcgagcagcacggcgggaaccggcagccggagcagtcccggagcagaagcagcagcagcagcagcagccctcgccgttcgcggagcgcagccgagccggccatggcgttgtcgatgccgctgaatgggctgaaggaggaggacaaagagcccctcatcgagctcttcgtcaaggctggcagtgatggtgaaagcataggaaactgccccttttcccagaggctcttcatgattctttggctcaaaggagttgtatttagtgtgacgactgttgacctgaaaaggaagccagcagacctgcagaacttggctcccgggacccacccaccatttataactttcaacagtgaagtcaaaacggatgtaaataagattgaggaatttcttgaagaggtcttatgccctcccaagtacttaaagctttcaccaaaacacccagaatcaaatactgctggaatggacatctttgccaaattctctgcatatatcaagaattcaaggccagaggctaatgaagcactggagaggggtctcctgaaaaccctgcagaaactggatgaatatctgaattctcctctccctgatgaaattgatgaaaatagtatggaggacataaagttttctacacgtaaatttctggatggcaatgaaatgacattagctgattgcaacctgctgcccaaactgcatattgtcaaggtggtggccaaaaaatatcgcaactttgatattccaaaagaaatgactggcatctggagatacctaactaatgcatacagtagggacgagttcaccaatacctgtcccagtgataaggaggttgaaatagcatatagtgatgtagccaaaagactcaccaagtaaaatcgcgtttgtaaaagagatgtcttcatgtcttcccctaagaatacgcttttcctaacaggctactccttcctgtagagcagaaattgtattttgcacgaacatgcagttattgaagattaggatcaaggatagacaaggtatagtagttatcttaaaatatacactcctaagcagtattattttaaaatcctttaccctggctacctcccctacccgggttcccctctctttaatttggagacactccaccacaaacttttcactttagaggtagcttgccatctctcaggagccctcaccattgtgtccattcactgtgtatagatggcagaacttttgaggtgcaatgtttaattgttaaaaatagtagccacgactttatcaggcagccccaaactggtgcataatgcatggtacaagaaatatttatgtattttttggaattttgtaatatttagtaggagtatatgaaaggattgctactgtatcagaaatattgtttcaatttagtctatcctggatatgtactaacgaatattaccaccagagaagagagctttctacaaaagtcactacagattttgctatattgctttgtagatagatttttacttttgcctaaaagcatttatccttcataccaattgtaacatctgacaccatgtagaagctaaaagtttagagggagtgagcgttttctcaagaccttcctcaagcattttatctttagaagagaaactgatgggcacctgatactctgtctaaatacgtttgttatatgtgttttgccctgtgccattcatttggaactttattgcattctttattttaaaaagcttgtttttacgtaatcatagagcttgctatttgtacatctgttgagcaacactacataactgatttttagttgacttagctatagcagtacaatgattagtaatgtaaaaattaacacagaaattaacctaaggaatgaagggtgggtttgtcaaaatatcaagtaaatttttgtttctaaagtacatttaatgtagatgacctaaagaatgcgttatccatcctatataaaagaaagataaaacacaggtcaccaattttctcatttcaccccatttaccttgtatagaggattgttcattcctttgggactaagttatagttatggtgagtgtgtatttactgtagttttgcctgatctcactcattgcacttcctggagttaaattttccaacagccatgttgaggaatagcactctgcatgtttttgttttgtttttcggggttttttttaattgaagccctaaaccaggaattatttgtgttctaacaggaggatgaacttgctgaaaataaaactttgctatgtatttactcttttttaaaagacaaaagcaaaaccagactttctacgtactactccaaagactgtgattgtgactataatacatttttggtaatttttttatacctaatttgtataggaagtgctatttctcataggctgtttcttgaaattttaagtttattgctttaaaatggcagtgtttctcccactttgatatgctaacatttagtaagcactggctttatgaaagcggctttttataagtatactgcattttttgagcctatcattaattagcttagtatgaaagataagaaaatctccatgttgtatccatttggctcaggaagattctttgccttacctttcttagaactctttattgcttatcaaaagtttgagtacccgcttggtttttttttggtaattaaatattgtatgatttatctggttcaaggaagatgcactattcagttatctattgagaaattattttgcagtggttttagtgggtgaaaatgtcccatctgcaccagtacacaggcaggcattatcattcttcacctactttttaaatagtggcaacttgggattctttctggtgattctgaaccttgcctcatagcttaaagtataaaaaaagattcaagagcagtgaggtttgttctttccagtgaatggtggactgagtggtgcgaggtggagggctaacaagaggaaagaactacattcttcagaatacagtgatgaaaattcattttgaaactcaaatattttcattttggatattctcctgtttttattaaaccagtgattacacctggccatccctctaaatgttctaggaaggcatgtctattgtgattttgatgaagacagaattatttttctctgtagaaacacagataccactttatcagggaagttagtcaaatgaaatggaaattggtaaatggacaaaagctagctagtaaaaaggacgacccagcaacatgctttaaccccattgtatgtttgtggaaagagcatagtttaacatcttgagaaatttgggacataaagttttcatggtagacagttcatgcagtatatgaattgacataatggaaataatctgattttatttttacaactaacatccattccccttcatttaaacaccttttgtgttttacttcagtgaggagattggagtctgaatggatctgttttccaagagattctgagaaatttttgtattcagcagttggaaagctctctattctagttgataaaacttcccttttttgatgtagatgcagatattctatacagttctgttgtcttttactaggactgtaaacttttgtgataaaattcaaataagattttatttctttgtaattttggctttcacaatttatctttaaatccttgagcaatctgtatacaattaagagatttctgacatttattcttacactaaatggatcaactctaggatttaggcatgttaacttctgttgtgttttgaatctctccagagttgcatgtagatagcatttatttctgtgcccttaaacccatttagaaaataactacaaagtaaaaatgtagaggaaatagaaatgtattttttcatgaacattttgatacaaatttcatcatttaatgattcaccaatttcttgcattaatttgaatttaagcatttaattcaaagagaggggagcatccattattggtacatgtgggcttttaaaaactccatcctttataaatagtcaaggtttgggccacacaaagtatatttttatcatggaaaaatttcaactcctcaagccgtaatgttgaacagaattggagtattttctttataatttcttgaacaggcaaatgaaagcttattatagaatgcatgtattttcttttatctttggaacatcagcaccagtatattgctggcagctattgtattaaaaaataaagtatattttcactatcaaaaaaaaaaaaaaaaaaaaaaaaaaaa

SEQ ID NO: 100 - DNA, 1675 bp, Homo sapiens
ccagccgtccattccggtggaggcagaggcagtcctggggctctggggctcgggctttgtcaccgggacccgcaggagccagaaccactcggcgccgcctggtgcatgggaggggagccgggccaggagtaagtaactcatacgggcgccggggacccgggtcgggctgggggcttccaactcagagggagtgtgatttgcctgatcctcttcggcgttgtcctgctctgccgcatccagccctgtaccgccatcccacttcccgccgttcccatctgtgttccgggtgggatcggtctggaggcggccgaggacttcccaggcaggagctcggggcggaggccgggtccgcggcagaccagggcagcgaggcgctggccggcagggggcgctgcggtgccagcctgaggctgggctgctccgcgaggatacagcggcccctgccctgtcctgtcctgccctgccctgtcctgtcctgccctgccctgccctgtcctgtcctgccctgccctgccctgtgtcctcagacaatatgttagccgtgcactttgacaagccgggaggaccggaaaacctctacgtgaaggaggtggccaagccgagcccgggggagggtgaagtcctcctgaaggtggcggccagcgccctgaaccgggcggacttaatgcagagacaaggccagtatgacccacctccaggagccagcaacattttgggacttgaggcatctggacatgtggcagagctggggcctggctgccagggacactggaagatcggggacacagccatggctctgctccccggtgggggccaggctcagtacgtcactgtccccgaagggctcctcatgcctatcccagagggattgaccctgacccaggctgcagccatcccagaggcctggctcaccgccttccagctgttacatcttgtgggaaatgttcaggctggagactatgtgctaatccatgcaggactgagtggtgtgggcacagctgctatccaactcacccggatggctggagctattcctctggtcacagctggctcccagaagaagcttcaaatggcagaaaagcttggagcagctgctggattcaattacaaaaaagaggatttctctgaagcaacgctgaaattcaccaaaggtgctggagttaatcttattctagactgcataggcggatcctactgggagaagaacgtcaactgcctggctcttgatggtcgatgggttctctatggtctgatgggaggaggtgacatcaatgggcccctgttttcaaagctactttttaagcgaggaagtctgatcaccagtttgctgaggtctagggacaataagtacaagcaaatgctggtgaatgctttcacggagcaaattctgcctcacttctccacggagggcccccaacgtctgctgccggttctggacagaatctacccagtgaccgaaatccaggaggcccataagtacatggaggccaacaagaacataggcaagatcgtcctggaactgccccagtgaaggaggatggggcaggacaggacgcggccaccccaggcctttccagagcaaacctggagaagattcacaatagacaggccaagaaacccggtgcttcctccagagccgtttaaagctgatatgaggaaataaagagtgaactgg

SEQ ID NO: 101 - DNA, 6722 bp, Homo sapiens
ggcacggggacatcaggatatcctgagtgtgtctgcagatggtggcatcgtgatgggctattctagtggcgtcaccaatgggctgaatgatgccagcgactccatctacacgaaaggcaccccggagattgctttctggggaagcaatgctggggtgaaaacaacacggctagaagctcattctgaaatggggagcactgaaattttggaaaaggagaccccagaaaatctcagtaatggtaccagcagcaatgtggaagcagccaaaaggttggccaaacgcctttatcagctggacagattcaaaagatcagatgttgcaaaacaccttggcaagaacaacgaatttagcaaactagttgcagaagaatatctgaagttttttgattttacaggaatgacgctggatcagtcactcaggtatttctttaaagcattctctcttgtgggagaaactcaagaacgagagagagttttaatacacttctccaatagatatttttattgtaacccagataccattgcttcacaagatggagtccattgccttacctgtgcaataatgcttcttaataccgatctacatggccacgtgaatattggaaagaagatgacctgtcaggagttcattgcaaatctgcaaggggtaaatgagggtgttgatttctccaaggatctgctgaaagctctgtacaactcaatcaagaatgagaagcttgaatgggcagtagatgatgaagagaaaaaaaagtctccctcagaaagtactgaggagaaagctaacggaacacatccaaagaccatcagtcgtattggaagtactactaacccatttttggacattcctcatgatccaaatgctgctgtgtacaaaagtggattcttggctcggaaaattcatgcagatatggatggaaagaagactccaagaggaaaacgaggatggaaaaccttttatgctgtactgaagggaacagttctttacttgcaaaaggatgaatacaagccagaaaaggccttgtctgaagaggacttgaaaaacgctgtgagtgtgcaccacgcattggcatccaaggccacggactatgagaagaaaccaaacgtgtttaaacttaaaactgccgactggagggtcttgctttttcaaactcagagcccagaggaaatgcaagggtggataaacaaaatcaattgtgtggcagctgtattttctgcaccaccatttccagcagcaatcggctctcagaagaagtttagccgcccacttctgcctgccactacaacaaaactgtctcaggaggagcaactgaagtcacatgaaagtaagctgaagcagatcaccaccgagctggccgagcaccgctcatatccccccgacaagaaggtcaaagccaaggacgtcgatgagtacaaactgaaagaccactatctggagtttgagaaaacccgctatgaaatgtatgtcagcattctcaaggaaggaggcaaagagctactgagtaacgatgaaagcgaggctgcaggactgaagaagtcgcactcgagtccttcgctgaacccggatacttctccaatcactgccaaagtcaagcgtaacgtgtcagagaggaaggatcaccgacctgaaacaccaagcattaagcaaaaagttacttagagtccatctgcggccaggaagtgctggtcatggagcaaaatagggtttttcaagatctttctggtaatccgtgaatatatttaaaaaaaaaaaagtctgtgacaaaacggtgcattagtaattttttctattgtatatttttgttagtttctgtacagattgtctttgctcttgatttcttttgctttgatgatttttgcaacttgatagctaatgcaccttttctgtgaggaggaggggatcgtgatttcagaatgaattatgtatcccttctcttttggttttctcttgtttgcagtctgctcagttgttttatgtattctcatatcaactgttaaacttttttttaaggttaaagaatttaatccattgtgaaacacttaactggacaaactgtagttttagtaaattctagctggagttaatatacgcctttatatgtgaaatcttgcccagtcacagaggtagaattgagcactcacagatgctccagtaagaatcacagtgctgggaatctagttgctccaatatgaggcagcttcatgtgcagcttagcacttgttgttgagatcggaccctgctggaagcagggaaaagaagcgtgaagatcgtaggattgagaacttagggaagcacattagcttgcttgaagtgctgattccatttcagccaagcaagggaaagaggaagtggagtcattttgcctttgaaggctgaggaaagattgatacccagttaattttgtttgctaaaggatgggggcaataatcggcccttgaggagctgcagcagtaggcatgtgctcagtctgcaggaattgttacctcactcccacagggtctagactagaaatccatcatctctatcgttgatatccttccatccaggaatagatttttcttactctacatatgtgtgtgtgcgtgcgtgtgtgtgcgtgtgtgggcatggggttgtgtcctggttgtgatattgaggtcttccttcctaacaaattaatactaaaatgaaacagcttttcttgtgtccttaagacaaaataaggaaggaaaacgtagctgcagttgtccacgatggatattggttctttaaaatatatctgaaagtagtagtcagaatgaattatggttggaaaactgaggaatcttctggttgcaggtgcaaagtgactttgtttattcttgtctcagtctccttgatagccacttcactctgctactactcaactttctcctaaaaatacttcatctattttcagtcctttctttctgtctactcaaaatggttctattaactttgcagtcatgagcttgttccagttacagtccctttgaagttcagggtgataaacagaatattcttctgtagaggaagagaaaggagtgaaagtttagcccactgagacctagagctttgtgatttcctaaccttgaaactctgtaatccctaaagttaaaatctccgcaagtggcacaacttcagaactaatagtatcactttgatttttctttttcctcccttagaaagtttctctagttctatagtttatttgttgaaggtactatgaccaaagaatcagctgctctacaggaatagcatggttccagtgaattagagaaaacctgctgtaaagccatggtagtgtctaagtggtatgttattatgatgtactagcatttatttacagaattatttattaacgtttacttccttcccctctgtaaatgtccatgactattgcccagagaaggcttacccctctctagggttgcagttgctttctttgtaataagtattttgccacacctgtaaaaaaaaaaaacctcacttttaactctctgccttgtttgggtaaaggcagtaactaagtttatgtttcagaactgcaaaacaaacaggatagttaccaatatggcccatgtgtcagattgatttttgtagcctctcactgaatccaacatatccacaagcaagttatctgtctttctacctgataatctaaattatcaggatatttgttttctgcctaaatgtttatactaagccgaggggagagaggtacctagaccatgtcatctacgagcttcagtaactaaagaaaaaggaacttccctgagtggcttgaatgtgtttgcccacagtctatatctatgtatatagaatgtctgtatgtattttacttatttaatatacattgaatggtaccttgctacagtatttctgacatttagagtagtgttgaaatactcggctagcatcagcaccactatagcactgtccgtgtcatatgagtcactaatattaactccagggacttctggataggctaatagatcattggatacgaagggctcttttgaagcttcagtataccatgtttgcatagtttatctttaaaaacaactttaaaggttcttttgtgagccaggatctcagactgccgtagcatgatgctgtccatctttagcgcatgggctgagaacacctcttccctgaggcttctgaaggttgctgtctgtcatgagtgcatgaaggaggccaagagtttatgctatgggaggaaccagtcactgatttgcctagattctgagagtctggcccatagccaaccacattttcctttgggataatttatttcctgtggcatctagccagaagaaattgaggatgtttcctttcacagctgctccaagcctgttgcccaattcacggtacaagggagcaccccttccctttcctctgaaggtacgccacccacctccgtcgcccacctcagcgcccaggagccttgggacttccttccatatgataaatcattcttcttcacgtcaatacacttcatattaatttctagtacagaaaatcttgacagctatcagaatgccttggtcatagtgttgttgcaaaattgaccatacaggtggcccatgtataaaatctgaattttaggggtttgtccccacctcgcatgctggcttttacagggaggtgtctgggattcctcattagcaatcaaaacttaattactgggatgcagagtccttactttatcgccagcccgtaggcatttctgaagtgcacttttttgaaacatcattttgctaactctcagcagtgtctaattaaactgagcaatacttttgtgaattttaattaatctcagcaaaaccatgatgggagagagtcctctgatggaaatgtagtccctggattatgtgtaacctttttattgctcttagatgcagaggatagaaagcattttttggtgcagtggtcttgtggcaaacacaagaccctctatgcgtctccaactgttatcctaatctagaaaatgaggactggcccctgggcaaaagtgacatgaggaatttactctggaagaggaaaatctgggtggctttccaaggctaagataggtttgtatttcaccctgtggccaagctacagaacttctgagattgtggaagaatttttgcaaccagcagggaaagaggcctcttactgcctaaacacaaagttacactgagcttttctactgtcctttgcctattgctccctctatcatgtaaagatctgggaaggatgagaggcagggcctgcttgtcatgagctgcactcttttctttttaactaatcattgacaattggaagaaaattgacgttaaagaagtttctccattgtcttactaacaaaaccttttgggtttcattaattgtccttgaaattgagttcctttggcatttttccttgcagtcatcagttaagcatgttgcatcctgaattcacagaagtttagctttgcaggtttgaatctctgtaatttaactcccgtggacttggtcgagttttcagcaggttgggagccacctctcttcatttcagcagtgagtcatcccttgacttttcaaatgacagaattttttccaattgtaaaattagcactgtaaaacaaagaaccaaagtggcatcctaagagttgttaaacctgaagtctagtttatgaggaattgtccaagttggagtttaaatagtatctgcttttgtctcaaagcatctaagttattctgacagaaaatggtaagtcagctttgcaggcagatgcgcctctgggcctcctaccttgctccacagctttctggccatcttgtctcccaggccatgccactgctctgccacatgtcagcaaatttctttccaccagtcttatagcatcttacatgatcaaatcatcacagaataaccccgtgatagattattgatagcaatagagaggggcggctttgtcactgatttttctctcagattccttttccatctctcatccataaaggaaggactgaaatccaaaggcattctccttttgtacctacagtatccagaacccacgtgggcagccttctgcttatgacaataattggcccattgcatgcagagagaatgtcttcatagagagaatgtcattaaatacttgaatctgcatgacagtttgacttgaatgcaacagcaggaaaattttgcaagttacataattgtatatacagtaggttttcttaagtctcttcggttcatcctttgtaatttgtgtgtgtatctgtagtattgcaggcttttggagactattcttacaggcagtatgtcagtcatcaaagaaaatgctgtcacctgccattgttgtatttgtgggtatttatagttgtatgtatgtaaatgcatcagtgtgtagattgcatatcagtgtatggtacatgtacatcaaaattatttttgtccttaatcagtgtgatatgaaaagcaagtacaacctcataggactgattatataatgaagttgttgagagtatatatagtggtattgttttattaaacttaaactcaaataatattttgattaaaatttttaataagactttatgctagaaaattctttgagctttgaatcaccagggcaaaaatgactttcaactaaccttgtgaatcttttgcagtgtactgtgtgcaataccaagggcatagctccctgtaatttgggaaatacagaaagaaaagaaaaaaaaaaaaaaaaaa

SEQ ID NO: 102 - DNA, 3490 bp, Homo sapiens
cgccagagtccggagcagccgccgcccgaccgcgccgagctcagttcgctgtccgcgccggctcccaccccggcccgaccccgacccggcccggtcaggccccatactcagtagccacgatggaggtgatgaacctgatggagcagcctatcaaggtgactgagtggcagcagacatacacctacgactcgggtatccactcgggcgccaacacctgcgtgccctccgtcagcagcaagggcatcatggaggaggatgaggcctgcgggcgccagtacacgctcaagaaaaccaccacttacacccagggggtgccccccagccaaggtgacctggagtaccagatgtccacaacagccagggccaaacgggtgcgggaggccatgtgccctggtgtgtcaggcgaggacagctcgcttctgctggccacccaggtggaggggcaggccaccaacctgcagcgactggccgagccgtcccagctgctcaagtcggccattgtgcatctcatcaactaccaggacgatgccgagctggccactcgcgccctgcccgagctcaccaaactgctcaacgacgaggacccggtggtggtgaccaaggcggccatgattgtgaaccagctgtcgaagaaggaggcgtcgcggcgggccctgatgggctcgccccagctggtggccgctgtcgtgcgtaccatgcagaataccagcgacctggacacagcccgctgcaccaccagcatcctgcacaacctctcccaccaccgggaggggctgctcgccatcttcaagtcgggtggcatccctgctctggtccgcatgctcagctcccctgtggagtcggtcctgttctatgccatcaccacgctgcacaacctgctcctgtaccaggagggcgccaagatggccgtgcgcctggccgacgggctgcaaaagatggtgcccctgctcaacaagaacaaccccaagttcctggccatcaccaccgactgcctgcagctcctggcctacggcaaccaggagagcaagctgatcatcctggccaatggtgggccccaggccctcgtgcagatcatgcgtaactacagttatgaaaagctgctctggaccaccagtcgtgtgctcaaggtgctatccgtgtgtcccagcaataagcctgccattgtggaggctggtgggatgcaggccctgggcaagcacctgaccagcaacagcccccgcctggtgcagaactgcctgtggaccctgcgcaacctctcagatgtggccaccaagcaggagggcctggagagtgtgctgaagattctggtgaatcagctgagtgtggatgacgtcaacgtcctcacctgtgccacgggcacactctccaacctgacatgcaacaacagcaagaacaagacgctggtgacacagaacagcggtgtggaggctctcatccatgccatcctgcgtgctggtgacaaggacgacatcacggagcctgccgtctgcgctctgcgccacctcactagccgccaccctgaggccgagatggcccagaactctgtgcgtctcaactatggcatcccagccatcgtgaagctgctcaaccagcccaaccagtggccactggtcaaggcaaccatcggcttgatcaggaatctggccctgtgcccagccaaccatgccccgctgcaggaggcagcggtcatcccccgcctcgtccaactgctggtgaaggcccaccaggatgcccagcgccacgtagctgcaggcacacagcagccctacacggatggtgtgaggatggaggagattgtggagggctgcaccggagcactgcacatcctcgcccgggaccccatgaaccgcatggagatcttccggctcaacaccattcccctgtttgtgcagctcctgtactcgtcggtggagaacatccagcgcgtggctgccggggtgctgtgtgagctggcccaggacaaggaggcggccgacgccattgatgcagagggggcctcggccccactcatggagttgctgcactcccgcaacgagggcactgccacctacgctgctgccgtcctgttccgcatctccgaggacaagaacccagactaccggaagcgcgtgtccgtggagctcaccaactccctcttcaagcatgacccggctgcctgggaggctgcccagagcatgattcccatcaatgagccctatggagatgacatggatgccacctaccgccccatgtactccagcgatgtgccccttgacccgctggagatgcacatggacatggatggagactaccccatcgacacctacagcgacggcctcaggcccccgtaccccactgcagaccacatgctggcctaggcggcctggccccagtgacggccccctctttgcaggcttttcctcctctctagaacctccttctgttggaggccctcccatctccccgctgaaacctgcgctccttttttggggggatcctttgctgctgagcttccccaagcacggtgtgccctggcctgccttcttcttgtgtctttggtggggatggggaggcctattcctgctggccccttctgggggtggtgggcaggtgacacggagtggcttgagcttctggggatgcaggtccaccgagcccctgacccctgtctgtccccgctcccctaacaggtgcggttcctcatctgagaggctctccgtgcaggcgatggggcaagacagaaaagtgcctgagctggggaagccggggtgtaacttcctgctgcaccctgcgcctccagaggtcctccgtagggtctttcttgggatagtgttctgctcctgcttttctgtcctgggcatgggtccagggcctgacaccccctccccgcccctgtggccctggccactaaagcttcagactcaagtacccattctgttttcccccagcaacgcccctccaaacctccagcctccctgtctccagctgcctgggcccggaagggctttggttccttctctgggtctgattttctcactgaactccaccgaccaactgccctaagcccccagggcctccagggcccaggttcgagacccaaacccccaaaatccaaaacttctcttgaaaagttcagggaccgtccaggggagatggggaggagatatggagtgagtcacctgctccagaagatgccagcttctctctccagggtgcttagttggctttgcccacccctcactccccagggagctccggggacagcttcctcacacccctgtcccacccacacagctgccctagctgaccccgagaagtgctcttggctgacccctctggtgtgtggtgaggggctttctcttccccttcctgtttcagacccccccatttcccgcacatggtgtggggggctgggggaggtccaagcagagtgttttattattatcgctttatgtttttggttattggtttttttgtatagaccaaagcaaagaaaataaaaataacacag

SEQ ID NO: 103 - DNA, 2415 bp, Homo sapiens; identical to SEQ ID NO: 21

SEQ ID NO: 104 - DNA, 2636 bp, Homo sapiens
ggcggagagggagcctggtgggcgggcggggcgcgtcttgcgggctccctcgggtaccggcgctgccgcaccccgccgcgctcccgcacccgcggcccgcccaccgcgccgctcccgcatctgcacccgcagcccggcggcctcccggcgggagcgagcagatccagtccggcccgcagcgcaactcggtccagtcggggcggcggctgcgggcgcagagcggagatgcagcggcttggggccaccctgctgtgcctgctgctggcggcggcggtccccacggcccccgcgcccgctccgacggcgacctcggctccagtcaagcccggcccggctctcagctacccgcaggaggaggccaccctcaatgagatgttccgcgaggttgaggaactgatggaggacacgcagcacaaattgcgcagcgcggtggaagagatggaggcagaagaagctgctgctaaagcatcatcagaagtgaacctggcaaacttacctcccagctatcacaatgagaccaacacagacacgaaggttggaaataataccatccatgtgcaccgagaaattcacaagataaccaacaaccagactggacaaatggtcttttcagagacagttatcacatctgtgggagacgaagaaggcagaaggagccacgagtgcatcatcgacgaggactgtgggcccagcatgtactgccagtttgccagcttccagtacacctgccagccatgccggggccagaggatgctctgcacccgggacagtgagtgctgtggagaccagctgtgtgtctggggtcactgcaccaaaatggccaccaggggcagcaatgggaccatctgtgacaaccagagggactgccagccggggctgtgctgtgccttccagagaggcctgctgttccctgtgtgcacacccctgcccgtggagggcgagctttgccatgaccccgccagccggcttctggacctcatcacctgggagctagagcctgatggagccttggaccgatgcccttgtgccagtggcctcctctgccagccccacagccacagcctggtgtatgtgtgcaagccgaccttcgtggggagccgtgaccaagatggggagatcctgctgcccagagaggtccccgatgagtatgaagttggcagcttcatggaggaggtgcgccaggagctggaggacctggagaggagcctgactgaagagatggcgctgggggagcctgcggctgccgccgctgcactgctgggaggggaagagatttagatctggaccaggctgtgggtagatgtgcaatagaaatagctaatttatttccccaggtgtgtgctttaggcgtgggctgaccaggcttcttcctacatcttcttcccagtaagtttcccctctggcttgacagcatgaggtgttgtgcatttgttcagctcccccaggctgttctccaggcttcacagtctggtgcttgggagagtcaggcagggttaaactgcaggagcagtttgccacccctgtccagattattggctgctttgcctctaccagttggcagacagccgtttgttctacatggctttgataattgtttgaggggaggagatggaaacaatgtggagtctccctctgattggttttggggaaatgtggagaagagtgccctgctttgcaaacatcaacctggcaaaaatgcaacaaatgaattttccacgcagttctttccatgggcataggtaagctgtgccttcagctgttgcagatgaaatgttctgttcaccctgcattacatgtgtttattcatccagcagtgttgctcagctcctacctctgtgccagggcagcattttcatatccaagatcaattccctctctcagcacagcctggggagggggtcattgttctcctcgtccatcagggatctcagaggctcagagactgcaagctgcttgcccaagtcacacagctagtgaagaccagagcagtttcatctggttgtgactctaagctcagtgctctctccactaccccacaccagccttggtgccaccaaaagtgctccccaaaaggaaggagaatgggatttttcttttgaggcatgcacatctggaattaaggtcaaactaattctcacatccctctaaaagtaaactactgttaggaacagcagtgttctcacagtgtggggcagccgtccttctaatgaagacaatgatattgacactgtccctctttggcagttgcattagtaactttgaaaggtatatgactgagcgtagcatacaggttaacctgcagaaacagtacttaggtaattgtagggcgaggattataaatgaaatttgcaaaatcacttagcagcaactgaagacaattatcaaccacgtggagaaaatcaaaccgagcagggctgtgtgaaacatggttgtaatatgcgactgcgaacactgaactctacgccactccacaaatgatgttttcaggtgtcatggactgttgccaccatgtattcatccagagttcttaaagtttaaagttgcacatgattgtataagcatgctttctttgagttttaaattatgtataaacataagttgcatttagaaatcaagcataaatcacttcaactgct

SEQ ID NO: 105 - DNA, 5896 bp, Homo sapiens; identical to SEQ ID NO: 22

SEQ ID NO: 106 - DNA, 2845 bp, Homo sapiens
cctgcctgcccgcctgcttgctctctggctgtgctcctgcttaaagaaatcagtccttcctttccgacttagtcctcgggaagaagtttcagactacaaggtatcattggaacatttcaagatcatcaaatcaaattccacagggattggtgaccaaccagaaggctcagacatctgattgctgacctgtccagacatcatctggtctccctgaacctgaaatcacaccatggatgattttgagcgtcgcagagaacttagaaggcaaaagagggaggagatgcgactcgaagcagaaagaatcgcctaccagaggaatgacgatgatgaagaggaggcagcccgggaacgccgccgccgagcccgacaggaacggctgcggcagaagcaggaggaagaatccttgggacaggtgaccgaccaggtggaggtgaatgcccagaacagtgtgcctgacgaggaggccaagacaaccaccacaaacactcaagtggaaggggatgatgaggccgcattcctggagcgcctggctcggcgtgaggaaagacgccaaaaacgccttcaggaggctctggagcggcagaaggagttcgacccaacaataacagatgcaagtctgtcgctcccaagcagaagaatgcaaaatgacacagcagaaaatgaaactaccgagaaggaagaaaaaagtgaaagtcgccaagaaagatacgagatagaggaaacagaaacagtcaccaagtcctaccagaagaatgattggagggatgctgaagaaaacaagaaagaagacaaggaaaaggaggaggaggaagaggagaagccaaagcgagggagcattggagaaaatcagatcaaagatgaaaagattaaaaaggacaaagaacccaaagaagaagttaagagcttcatggatcgaaagaagggatttacagaagttaagtcgcagaatggagaattcatgacccacaaacttaaacatactgagaatactttcagccgccctggagggagggccagcgtggacaccaaggaggctgagggcgccccccaggtggaagccggcaaaaggctggaggagcttcgtcgtcgtcgcggggagaccgagagcgaagagttcgagaagctcaaacagaagcagcaggaggcggctttggagctggaggaactcaagaaaaagagggaggagagaaggaaggtcctggaggaggaagagcagaggaggaagcaggaggaagccgatcgaaaactcagagaggaggaagagaagaggaggctaaaggaagagattgaaaggcgaagagcagaagctgctgagaaacgccagaagatgccagaagatggcttgtcagatgacaagaaaccattcaagtgtttcactcctaaaggttcatctctcaagatagaagagcgagcagaatttttgaataagtctgtgcagaaaagcagtggtgtcaaatcgacccatcaagcagcaatagtctccaagattgacagcagactggagcagtataccagtgcaattgagggaacaaaaagcgcaaaacctacaaagccggcagcctcggatcttcctgttcctgctgaaggtgtacgcaacatcaagagtatgtgggagaaagggaatgtgttttcatcccccactgcagcaggcacaccaaataaggaaactgctggcttgaaggtaggggtttctagccgcatcaatgaatggctaactaaaaccccagatggaaacaagtcacctgctcccaaaccttctgacttgagaccaggagacgtatccagcaagcggaacctctgggaaaagcaatctgtggataaggtcacttcccccactaaggtttgagacagttccagaaagaacccaagctcaagacgcaggacgagctcagttgtagagggctaattcgctctgttttgtatttatgttgatttactaaattgggttcattatcttttatttttcaatatcccagtaaacccatgtatattatcactatatttaataatcacagtctagagatgttcatggtaaaagtactgcctttgcacaggatcctgtttctaaagaaacccatgctgtgaaatagagacttttctactgatcatcataactctgtatctgagcagtgataccaaccacatctgaagtcaacagaagatccaagtttaaaattgctgcggaatgtgtgcagtatctagaaaaatgaaccgtagtttttgtttttttaaatacagaagtcatgttgtttctgcactttataataaagcatggaagaaattatcttagtaggcaattgtaacactttttgaaagtaacccatttcagatttgaaatactgcaataatggttgtctttaaaaaaaaaaagaatgtactgttaaggtattactttttttcatgctgatgattcatatctaaattacattattatgttagctgacagtggtactgattttttaggttggttgttttgtggatttctttagtagtgatagtagcctgaaccacattttagataactcaattatgtatgtatgtgcatacacatatacaaacacactaatggtagaatgcttttttatgtgctagactattatatttagtagtatgtcattgtaactagccaatatcacagcttttgaaaaattaaaaaatcatcatcactataatatttcatatttgccaacagaaacatggcagataggtatcaatatgttttcaatgcctgatgacctataagaagaaagtattgaaaagaagagagattagaactgttagaaggagttgaaattttctaaaagacatagtatttagtttataattaaatgcattcttgaagtcc

SEQ ID NO: 107 - DNA, 5047 bp, Homo sapiens
ccgttgctgtcgccgttgctgtcgggggcgctgtgcgctgaggaaggcgcgggcgagccggagcagaagaaggagggagggagccagccgctgcagccaccaccgccaccatgtcctaccaaggcaagaagaacatcccgcggatcacgagtgaccgtctccttatcaagggaggcagaatcgtcaatgatgatcagtccttttatgctgatatttacatggaagatggcttaataaaacaaattggagacaatctgattgttcctggaggagtgaagaccattgaagccaatgggaagatggtgatccctggaggcatcgatgtccatactcacttccagatgccatataagggaatgaccacagtagatgacttcttccaagggacaaaggcggccttagcaggtggcaccaccatgatcattgaccatgtggtgcctgagcctgagtccagcctgactgaggcctatgagaaatggagagagtgggctgatgggaagagttgctgtgactatgccctgcatgtggacatcacccactggaatgacagcgtcaagcaggaagtgcagaacctcatcaaggacaaaggggttaactccttcatggtttatatggcttataaggatttgtatcaagtatctaacacagagctctatgagatcttcacctgcctgggagagctgggggccattgctcaagttcatgctgagaatggggatatcattgcccaggagcaaacccgcatgttggaaatggggataactggcccagaaggccatgtactgagcaggccagaagagctggaagctgaggctgtgttccgtgccatcaccattgccagccaaaccaattgccctctctacgtcacaaaggtcatgagcaagagtgcagctgacctcatctcacaagccaggaaaaaaggaaatgtagtctttggtgagcccatcactgccagcctcggcatagatggaacccattattggagcaagaactgggccaaggcggctgcatttgtgacatccccacccctgagccctgacccaactactccggactacatcaactccttgctggccagcggggatctgcagctatctgggagtgcccactgcaccttcagcactgcccagaaagcaattgggaaggacaacttcacagccattcctgagggcaccaatggtgtggaggagcggatgtctgtcatctgggacaaggctgtggccacagggaaaatggacgaaaaccagttcgtggctgtgacaagcacaaacgctgccaagatcttcaacctgtatccccgcaagggaagaatatctgtgggttctgacagcgacctcgtcatctgggatccagatgctgtgaagatcgtctctgccaagaaccaccagtctgcggcagagtacaacatctttgaagggatggagctgcgcggggctcctctggttgtcatctgccagggcaagatcatgctggaagatggcaacctgcacgtgacccagggggctggccgcttcataccctgcagcccgttctccgactatgtctacaagcgcattaaagcacggaggaagatggcagacctgcatgccgtcccaaggggcatgtacgatgggcctgtgtttgacctgaccaccacccccaaaggtggcacccccgcaggctctgctcggggctctcctactcggccgaacccacctgtgaggaatcttcatcagtcgggatttagcctgtcaggcacccaagtggatgagggggttcgctcagccagcaagcgcatcgtggcccccccaggcggccgttctaatatcacatctctgagttaagcaagccttcctcaaagagaggggcagaagcaagaagagattgttttgaagccaaaatggtacaccgatatttaagaaggaaagcgaatccaaacggttgtgatctaaagaatcaataagcctcaagccttatgtttctccaatgttacgctcgcttgcctagctttacgaatattgctttgttttctgtttatgcatagccttgatttgtttgactcccctccccccatttacatgcatgcaatcagacaggccactaaggtaaaagagtctgctctatcatagtgttgagagcgtgtgtagtgctgcatcttatgacaaggggacagacaagctgggacgtcagggaaatgaacaaaagggacgcaggttatttggggtgagtgggtggtgggagcctggagcaaggtggagggtgcagaggggctggggtagggcatgtaggagggaggtgggtgggtcaggtgagtggaaggggtgttgtatattgtgttgatgacgtacgttatttccatggaagatagccgctgtggcagctgtcacatcaccacagctccctagggtctgccgagaaggcaggcagtctttgggttctgttctttgtcacgtcccctacaagtaaattttgtttctttgaacgtttattaaaatgccaagacccaaccatttcttccacctgcttgattgtgccagtgtttgctcaggcctctttcttagtgttgctttcaaatccttctctttcctgggttgggaaggccaggcagggacagagcaaatgacacttctcttcctcttgccctccctgcctctttggtgctcttaaaagccagcagctgagaacatagcacaggcccacgtggtgagggcacccacagcttaaagacgcttccttctaaacacggcgaggtcacctctcactcttctgtctttgcaaaccgagaagagtggcatgcttctggcatcccaagtcaggattttagctcagatgaggcagaatgaagggcctctcttacaggcagtttgtgtttgattctctcgatcctggcacatccatgataaataggagtttttgaaagttggttttattaggtgttccctaatttttaccgtaataggtcatctcagcttatatgaaagtcaagtggggaactgggaaagccaaagtcagtcttgagcagagggagcacattttgtggacctggttccacctttccattccaaaccacctgtttccccttccattagcagaaactctgggggaactttgtgtctcagtcctagaatctccccaagtgagtggaagtgacatgatgcagtcttcctcatggggcacctgaaagaaattagtgtgggtgcttcgatctaccttgtctgtcagagttgaatatctctttccctatcatgctgcttctgaaaattcagttttggagcaagtcctgtgagcaagataagaatctatagaaccaagatgctcattttcagaagaaatatgttcaacctgggatcagacttccatgctctggggaatccaagtggtagcacctgtaaccctgtgtactaagtgctttgaagagaagagcaggcctcagacaccttttaattgcttaggagaaaccattgtctctgactgcaggtttgaataagttgaagaccagagaaaagtacacactgggctacaaaggaatttggagatagccaaggaacaggatttcccctagcaagctaccttctgttcaaatcatgaaaaaagactatttccccttagaatagggaagcttgctattttaaagctcttgtagtgcttttcttttaagggagatgtagtaaaagggaaaatgtagctcttagtttacacttcaaagatgtgggggtctttcagagaactaagaataacagttttatgtgcagagagagtttgccagatctgaagcatatacctcattgactaggctgttactttgggataggttgcagtaccagccacagccagcagatagaggaaaagacacacataaactcgcttctgagcgtccacttctgcactctctgctctgctgttactcagcccctgagtctgactcatctctgcacaacctctctgtgccatgaagataagtcttccatggccaaatcggtcatccgcactgcccttgggacttccgaagtgaaccattccaccagaacctttgattctgcacaagatttccttgctctgggaacaacccccaaatgcccttgggaggaacaacatgagctcaggaagcctctctttcttcacttaccattactaactctccaagcatagaaatccctgggaattgcgagaataactcccactattttaaaatttatattcagatttgtttcgtttcataagacacatcaaacaggcctatacaaaaggtttaggaaaagaaaacaatggtgagtcccggccctcttcgaattcactggcacctcatgcaagtgtaggaaggcacgctggatcgtctatctgattccaaagctgtcctttgccatctcatcccttggcctgccccccaaccctgaggatgcccctgccatccccccaacctcctcatattgcctctgaacccagatggcaatccatcccggttctctctgagggccacgggcttgggtagtggaaagggtgtttgggaaattgttaaatcagttacccgtagtagagctatttcttgtacttctaagttttctagaagtggaaggattgtagtcatcctgaaaatgggtttacttcaaaatccctcagccttgttcttcacgactgtctatactgagagtgtcatgtttccacaaagggctgacacctgagcctggattttcactcatccctgagaagccctttccagtagggtgggcaattcccaacttccttgccacaagcttcccaggctttctcccctggaaaactccagcttgagtcccagatacactcatgggctgccctgggcagccagcattcattgtaagttccctctttgaaaactggtgtgtgggtgttcagttctgtgtctggtgggtatggacagacagtaatctcctgtgatctgtgctagctgtgaggcagctctggaacgtgaagagctgtttggtttgaaccgtgaacaaaactgtgttttgagtttagctgacattaaagaaaaaagttcatcacgtgactgttaatgtaaacctggttattaaaataactatgaaattac

SEQ ID NO: 108 - DNA, 1828 bp, Homo sapiens
cagttacagggagcaccaccagggaacatctcggggagcctggttggaagctgcaggcttagtctgtcggctgcgggtctctgactgccctgtggggagggtcttgccttaacatcccttgcatttggctgcaaagaaatctgcttggaagaaggggttacgctgtttggccgggcagaaactccgctgagcagaacttgccgccagaatgctcctcctgttgctgagtatcatcgtcctccacgtcgcggtgctggtgctgctgttcgtctccacgatcgtcagccaatggatcgtgggcaatggacacgcaactgatctctggcagaactgtagcacctcttcctcaggaaatgtccaccactgtttctcatcatcaccaaacgaatggctgcagtctgtccaggccaccatgatcctgtcgatcatcttcagcattctgtctctgttcctgttcttctgccaactcttcaccctcaccaaggggggcaggttttacatcactggaatcttccaaattcttgctggtctgtgcgtgatgagtgctgcggccatctacacggtgaggcacccggagtggcatctcaactcggattactcctacggtttcgcctacatcctggcctgggtggccttccccctggcccttctcagcggtgtcatctatgtgatcttgcggaaacgcgaatgaggcgcccagacggtctgtctgaggctctgagcgtacatagggaagggaggaagggaaaacagaaagcagacaaagaaaaaagagctagcccaaaatcccaaactcaaaccaaaccaaacagaaagcagtggaggtgggggttgctgttgattgaagatgtatataatatctccggtttataaaacctatttataacactttttacatatatgtacatagtattgtttgctttttatgttgaccatcagcctcgtgttgagccttaaagaagtagctaaggaactttacatcctaacagtataatccagctcagtatttttgttttgttttttgtttgtttgttttgttttacccagaaataagataactccatctcgccccttccctttcatctgaaagaagatacctccctcccagtccacctcatttagaaaaccaaagtgtgggtagaaaccccaaatgtccaaaagcccttttctggtgggtgacccagtgcatccaacagaaacagccgctgcccgaacctctgtgtgaagctttacgcgcacacggacaaaatgcccaaactggagcccttgcaaaaacacggcttgtggcattggcatacttgcccttacaggtggagtatcttcgtcacacatctaaatgagaaatcagtgacaacaagtctttgaaatggtgctatggatttaccattccttattatcactaatcatctaaacaactcactggaaatccaattaacaattttacaacataagatagaatggagacctgaataattctgtgtaatataaatggtttataactgcttttgtacctagctaggctgctattattactataatgagtaaatcataaagccttcatcactcccacatttttcttacggtcggagcatcagaacaagcgtctagactccttgggaccgtgagttcctagagcttggctgggtctaggctgttctgtgcctccaaggactgtctggcaatgacttgtattggccaccaactgtagatgtatatatggtgcccttctgatgctaagactccagaccttttgtttttgctttgcattttctgattttataccaactgtgtggactaagatgcattaaaataaacatcagagtaactc

SEQ ID NO: 109 - DNA, 2539 bp, Homo sapiens; identical to SEQ ID NO: 32

SEQ ID NO: 110 - DNA, 2415 bp, Homo sapiens; identical to SEQ ID NO: 21

SEQ ID NO: 111 - DNA, 3052 bp, Homo sapiens; identical to SEQ ID NO: 95

SEQ ID NO: 112 - DNA, 2654 bp, Homo sapiens
agccggagctggagccgaggcggcggcgggacgcggccggccggacaaatttcctgctaggctgcggacgagcgggcggcaggagccggcgcgagcggcttcaggaacccacggcctctgcgcgtccccgcgacccttcttcgcgcccggcgaagacagccgggcgccccggagggcggcgggcaggcgcccgggagatgcggagcctccgctgcagcgcgatctgcgcgaccagaccggcccccccgagactatagccttcactttccctcggtccaccatggagcccttgtgtccactcctgctggtgggttttagcttgccgctcgccagggctctcaggggcaacgagaccactgccgacagcaacgagacaaccacgacctcaggccctccggacccgggcgcctcccagccgctgctggcctggctgctactgccgctgctgctcctcctcctcgtgctccttctcgccgcctacttcttcaggttcaggaagcagaggaaagctgtggtcagcaccagcgacaagaagatgcccaacggaatcttggaggagcaagagcagcaaagggtgatgctgctcagcaggtcaccctcagggcccaagaagtattttcccatccccgtggagcacctggaggaggagatccgtatcagatccgccgacgactgcaagcagtttcgggaggagttcaactcattgccatctggacacatacaaggaacttttgaactggcaaataaagaagaaaacagagaaaaaaacagatatcccaacatccttcccaatgaccattctagggtgattctgagccaactggatggaattccctgttcagactacatcaatgcttcctacatagatggttacaaagagaagaataaattcatagcagctcaaggtcccaaacaggaaacggttaacgacttctggagaatggtctgggagcaaaagtctgcgaccatcgtcatgttaacaaacttgaaagaaaggaaagaggaaaagtgccatcagtactggcccgaccaaggctgctggacctatggaaacatccgggtgtgcgtggaggactgcgtggttttggtcgactacaccatccggaagttctgcatacagccacagctccccgacggctgcaaagcccccaggctggtctcacagctgcacttcaccagctggcccgacttcggagtgccttttacccccattgggatgctgaagttcctcaagaaagtaaagacgctcaaccccgtgcacgctgggcccatcgtggtccactgtagcgcgggcgtgggccggacgggcaccttcattgtgatcgatgccatgatggccatgatgcacgcggagcagaaggtggatgtgtttgaatttgtgtctcgaatccgtaatcagcgccctcagatggttcaaacggatatgcagtacacgttcatctaccaagccttactcgagtactacctctacggggacacagagctggacgtgtcctccctggagaagcacctgcagaccatgcacggcaccaccacccacttcgacaagatcgggctggaggaggagttcaggaaattgacaaatgtccggatcatgaaggagaacatgaggacgggcaacttgccggcaaacatgaagaaggccagggtcatccagatcatcccgtatgacttcaaccgagtgatcctttccatgaaaaggggtcaagaatacacagactacatcaacgcatccttcatagacggctaccgacagaaggactatttcatcgccacccaggggccactggcacacacggttgaggacttctggaggatgatctgggaatggaaatcccacactatcgtgatgctgacggaggtgcaggagagagagcaggataaatgctaccagtattggccaaccgagggctcagttactcatggagaaataacgattgagataaagaatgataccctttcagaagccatcagtatacgagactttctggtcactctcaatcagccccaggcccgccaggaggagcaggtccgagtagtgcgccagtttcacttccacggctggcctgagatcgggattcccgccgagggcaaaggcatgattgacctcatcgcagccgtgcagaagcagcagcagcagacaggcaaccaccccatcaccgtgcactgcagtgccggagctgggcgaacaggtacattcatagccctcagcaacattttggagcgagtaaaagccgagggacttttagatgtatttcaagctgtgaagagtttacgacttcagagaccacatatggtgcaaaccctggaacagtatgaattctgctacaaagtggtacaagattttattgatatattttctgattatgctaatttcaaatgaagattcctgccttaaaatattttttaatttaatggtcagtatattttgtaaaaatcatgttaatttatttcatagttgacattaatatcttccctaatttctttgtatatattttgttatgccttaaaggccacctgctatacagttgttaaatcttaaatatgctttttaaaaattggaataatgtattaaggtcaaataatatcccataaaatatatatttctgctaatattagtaaatatcttaatttttaaaaaaaaaaaaaaaaaa

SEQ ID NO: 113 - DNA, 4221 bp, Homo sapiens
gtcggccgtcccctttaatttttaaatacacggtcccctcttttctctggggggggcaagcaagaaatcaaagaaggaggagacaagccgtcaattttctccaaaacaaaccccaccgggcaatttggtctcggggtagggggagacggggtgattgcaaattattccaggacgagatccagttctccagcgggaaaggggcaaaggaacgccgcgcgttggaagggccagggtacgcagctccccttgcagcgcccgcaggacccccgcaagctcgtgccggcgaaatcggagaccgccgatctgtcctcgttctctcctgcacgtctggctgcattcggaggaagacctggggcgcgagcgagcggcgacagcatgagcctgtgctgacctccgcgcggcgggccgagcccagggctttgtcgcggtacctgcgcccagcccgcgccgcaactctgtgcccagcttttgcaatcttttgttgcagcgctgaccgcaccaagttaaatgctcccttgcaatttttcttttttttgtttgtttgtttaatttttggagagctcgcgatcttggaaaagcctcagacgccatctacagttaaaacgtaggtaactgccctctcccgcaccccccccttacacgccccccaccctttccaccaaaaaaagggggtgcagcgcggattctggctgccgtgcgtcgccagccggtagacccgtgcttgtttcctttctctttttgtttggcttctaacgcgttgggactgagtcgccgccgtgagctccccgaagactgcacaaactaccgcgggctcctccgccccgtctgcgattcggaagccggcctgggggtcgcgtcgggagccctgcgctgcagctccgcaccttagcagcccgggtactcatccagatccacgccggggacacacacacagagtaactaaaagtgcggcgattctgcacatcgccgactgctttggggtaacaaaaagacccgagttgcctgccgaccgaggacccccgggagccgggctcggagcagacgaggtatccggcggcgcccatttgggggcttctaactctttctccacgcagcccctcttctgtcccctcccctctcgctcccttttaaaatcagtggcaccgaggcgcctgcagccgcactcgccagcgactcatctctccagcgggtttttttttgtttgtcgtgtgcgatcctcacactcatgaacatacacaggtctacccccatcacaatagcgagatatgggagatcgcggaacaaaacccaggatttcgaagagttgtcgtctataaggtccgcggagcccagccagagtttcagcccgaacctcggctccccgagcccgcccgagactccgaacttgtcgcattgcgtttcttgtatcgggaaatacttattgttggaacctctggagggagaccacgtttttcgtgccgtgcatctgcacagcggagaggagctggtgtgcaaggtgtttgatatcagctgctaccaggaatccctggcaccgtgcttttgcctgtctgctcatagtaacatcaaccaaatcactgaaattatcctgggtgagaccaaagcctatgtgttctttgagcgaagctatggggacatgcattccttcgtccgcacctgcaagaagctgagagaggaggaggcagccagactgttctaccagattgcctcggcagtggcccactgccatgacggggggctggtgctgcgggacctcaagctgcggaaattcatctttaaggacgaagagaggactcgggtcaagctggaaagcctggaagacgcctacattctgcggggagatgatgattccctctccgacaagcatggctgcccggcttacgtaagcccagagatcttgaacaccagtggcagctactcgggcaaagcagccgacgtgtggagcctgggggtgatgctgtacaccatgttggtggggcggtaccctttccatgacattgaacccagctccctcttcagcaagatccggcgtggccagttcaacattccagagactctgtcgcccaaggccaagtgcctcatccgaagcattctgcgtcgggagccctcagagcggctgacctcgcaggaaattctggaccatccttggttttctacagattttagcgtctcgaattcagcatatggtgctaaggaagtgtctgaccagctggtgccggacgtcaacatggaagagaacttggaccctttctttaactgagctcatgccccacggagacttagcaggttccaggagtgagcgagggcagcggaaaggagttcttccgggggacacgaattgcctggctgagtagcaagaaagacacactcttaagtttcttggttcagagcaggaaaaccttcaaggagctgactgaccacgtagcatgggggcaagaggcgtgggatggggattggggtgagatggatgggagcccgctggagcttgtcttccctaacatagcctgggagaccaccccttgccacttgggccacttccgcctaccccacttttcattttgttccaaaatagttgcagatcctgacagaatcaaaactctctgcctcaaacacacatcctggcatcgcactgttagcatttaacttcttgttaggattcagggaaggaacagttggccaagaattttttttcttttaaacaagccaaccacctagctggtaattaatgaggttcacttaaaaaaaaaattcggtgcacacagactgacatgaaacctgggtgctacagtaaaagaaaacaaaagtccagtttgtgtctcttaatcgctcacttcaactcatttcttctaaataaactatttaatatcctggtcaggaaatgacatgttaatgctttgctccctgaagggggaaaaaatctgtcctttaacaagctattctgttttgtgtcaattgggtccgtggcaaggaagctattaggaagtcaaacggtccaggatgcattacctgctaatccttaggtttaaagggggaaagaaaagggaagaagaaaggaaaagagaaatccaactcctttttcatgttttgcttttgaacaatgagggtttgtgtgacaggcattcctctttgctgagatgatagcaatggcctgagattttagcaagctcctggagtctgatgcttttgcagtactctgatcgcaactaaacatttgtctttgttttattagaaactagtgaaacaaagcaggttgtcccacatgtataaaatacagggcagctatttagttttctttacagagaatgatccttttaaggcttgtaaggccctctggtttggacaaaaaccctcagtagagacaagcgggaaggataattagctgaaagctatgatgatataaataaaaacagctctctatcccaatacgcacctttgtattttcaagaactcttctatttattaaggaaaatgtcacattgtgatgtattaagccagtacttcaattacgggttgacttgggatgacatattacatgctgtagttaacatttataattctttttccttgtttgagtatttctgtctctgaaataaccttttacttggcttttctagatagctttatttgatttcgagtggcaaaatgttttttattacggcttttctattgctgtatgatacagaactcttttggcataaatatttgtgttcccagtacctcacttgttcggatttgactgcctgtatatgttttgtgaaatggtcctgtttttgggtaggtgacacgtggactctagtatgtaaatgttacttgaatctgtgcttcataatagtgtgtggcatgtatgtgcagactcttggatgctttatgcctgcgcaccaggagccctgtcctcacgttcccaggagggcggcttcacccttcgtaaccaggagacaaggcggccatggatttgcccttgattctattttgctaatggaagatagaaaggagagaaggtttttttttttttttaacattctgaagatggtgctgtgtcaagaaggaccttttttttcccctctcccctattttttaagtaccttggaggaggagaggttggtgacatgcatggtggggatctatggcctctggtgctttgtcctgtatttggtttaatgtttttgtcctaatctcttcaatcaataaaattgtgcgtatttaactaaaaaaaaaaaaaaaaaa

SEQ ID NO: 114 - DNA, 3136 bp, Homo sapiens
aagtagcacggattgctcatccgatccgtgccgccgcagggagtgtgtcaagttacagaggcgccggaatcggcccctgcgctcctcgccagccgccacgacccacctctgcccatggggccctccgtgtgcgccccttcgcccggggactgaaactgactggcccgggagacacgaggcgcccagaaggactgacagcgcggcaccaactgctctgcagacacttgaagggaaagactgggcggagagaaggagagccggtcagattcccctaactttcctggacttggaacgttcttcgaaataacttttttctcacctaggtgtaccccaattaccgctggttgtgctttttcggcacttcctctcctactgctaatttttccgtcctctttgccgggagcagcggaaagggacgttttccagcgatacaagccctttccccctgccccgcagtttggatagagccttttggcagcggctgtcgcctttatttattctatttatttatttattggttctcaagacgcgagaggatggtagcggagcgcacccacaaagcggcagccaccggtgcccgcggccctggggagttgggcgcgcccgggacggtggctctggtggcggcgcgggcggagcgcggcgcacggctgccgagtccagggtcgtgcgggctgctgacgctggccctctgctcgctggcactcagcctgctcgcccactttcggacggccgagctgcaggcccgggtgctgcgcctggaagcggagcgcggggagcagcaaatggagacggctattttgggacgagtcaatcaactgctggacgagaaatggaagctccactcaaggaggcgccgggaggccccaaagacatctccaggatgtaactgcccaccagcatttcagggtcccactggaagacccggactcccaggggacaaaggtgccattgggatgcctggacgtgtggggtcccccggagacgctgggctgtccatcattggtccccgcggcccccctggtcaaccaggaactagaggtttccctggatttccgggtcccattgggctggacggcaaaccgggccacccaggaccaaagggcgacatgggtctgacgggtcccccaggacagccgggaccccagggacaaaaaggagaaaagggtcagtgtggagagtacccacaccgggagtgcctaagcagcatgccagcagctctgcgctccagccaaataattgccctgaagctgctgcctctcctcaattcagtgcgactggctccacccccggtcataaaaaggcggacgttccagggcgaacagagccaggccagcatccaaggtccaccagggcccccaggcccccctggaccaagtggacctctggggcacccaggactgccagggcctatggggccacctggcttacctgggcctcctggaccaaagggagacccagggatccagggctaccacggccggaagggagaacggggcatgccagggatgccaggcaagcatggagccaagggggcgcccggaattgccgtggctgggatgaagggtgagccagggatcccaggaaccaagggtgagaagggggctgaaggctcccctgggcttcctggcctcctggggcagaagggagagaaaggcgatgctggcaactccattggaggaggcagaggggaacctggccctccagggctccctgggcccccagggccaaagggagaagcaggtgtcgatggccaggttggccccccagggcagccaggagacaagggggagcgtggagcagctggagaacagggaccagatggccccaagggctccaagggagaaccagggaaaggagagatggtggattacaatggaaacatcaatgaggctctccaggagatccggacgctggccttgatggggcctcctggtcttcctgggcaaattggcccacctggagctccagggattccaggccagaagggggagattggactgccaggccctccaggacacgatggggaaaagggacctcgcggtaaaccaggagacatgggccctcctggtccccaaggccccccaggaaaggatggacctccaggagtgaagggagaaaacgggcacccagggagcccaggagagaagggggaaaaaggggagacaggacaagcaggctcaccgggagagaaaggagaagccggggagaagggcaatccaggagcagaggttcctgggctgccagggccagaggggcctcccggacctccggggctccaaggtgttcctggaccaaagggggaagcaggactagatggagcaaaaggagagaaaggcttccagggagaaaaaggagaccgtggtcccctgggactacccggagcttcaggtttggacggcaggcctgggccaccgggtactccaggaccaattggagttccaggcccagcgggaccaaagggcgagaggggcagcaaaggagaccctgggatgacaggaccaacgggagcagctgggcttcctggtttacatggaccacccggggacaagggaaaccggggggagagggggaagaaaggctctagagggcctaaaggggataagggagaccaaggagcgcctggattagatgccccctgcccattgggcgaagatggcttaccagtccaaggctgctggaacaagtgatgcctctaaccttggattggcctgtgtgtgtgtttgtacatagaatatttatttttatacagttttcactttttgaaaatgccagaagtatgatgcatcttacagattattaaaaaagaaagaaaaacctgcatattttgtacagaaaatatcaacctcttcccttttgtttacaagatgttttgtataagcctatgtctctaatacattttttgtttggtcgtaatgtctgcatgatatttgtgcacatttattaagtatcgaagcttaataaattattgtgtcctggtgccaaagggggccagccagaactgaggtgctggctagctcatgtgtgaattcacataaatgtagaggtccatgatatttgctaagctaggtgtgtctaagagtattttaaacccttatggattttcattattaaaggaaatgaaacatggcaattc

SEQ ID NO: 115 - DNA, 1332 bp, Homo sapiens
gcgtgtgttttttctttcctctttcccctgcctgtgtgcccttctccaggatggcagaggcggaattgcacaaggaaaggctgcaagccatagcagaaaaaagaaagaggcagactgaaatagaaggcaagcgacaacagcttgacgagcagatacttctgctgcagcattccaagtccaaagtgcttcgggagaaatggctgctgcagggcatacccgctggaactgccgaagaggaggaagccaggaggcggcagtctgaagaggatgagttcagagtcaagcaacttgaagataacattcagaggctggagcaagaaatacaaacgctagaaagtgaagagtcccagatatctgccaaagagcaaatcatcctagagaaactgaaggaaacagaaaaatccttcaaggactttcagaagggtttctccagtacggatggagatgcagtaaattacatttcctcccagcttcccgacctgccaatcctctgttcacgaacagcagaaccatcacctgggcaggacgggaccagcagagcggctgctgtgtacgccatggaaattaatgtggagaaagacaaacaaacaggagagaccaagattctctctacatctaccattggcccagagggggtccatcagaaaggagtcaaagtctatgatgatggtaccaaagtagtgtatgaggtgcgctcaggaggcaccgtagtagaaaatggagtgcacaaattaagcacaaaggatgtagaagagcttattcagaaggctggacaatcaagcttaggaggagggcacgtgtctgaaaggactgtgattgcagatgggagcctcagccatcccaaggaacacatgctctgcaaagaagctaagttagaaatggtacataagtctaggaaagaccattcttccgggaacccagggcagcaggcccaagcccccagcgctgcagggccggaggcaaacttggatcagcccgtcaccatgatttttatgggctaccaaaatatcgaggatgaagaggagacgaaaaaggtgctaggctatgatgaaaccatcaaggctgaattggtcctcattgatgaagatgatgagaagtcattgagggagaagacagtgacggacgtgtccactattgacgggaacgcggctgagcttgtgtccgggaggccggtctcagacaccacagagccctcatccccagaagggaaggaagagagcctagctacagagccagccccaggtacccaaaagaaaaagcgctgtcaatgctgtgttgtcatgtgaccacttctttcttctcctttcttctgggcagcctgtactctccacc

SEQ ID NO: 116 - DNA, 3088 bp, Homo sapiens
acaaaaaagcttttacgaggtatcagcacttttctttcattagggggaaggcgtgaggaaagtaccaaacagcagcggagttttaaactttaaatagacaggtctgagtgcctgaacttgccttttcattttacttcatcctccaaggagttcaatcacttggcgtgacttcactacttttaagcaaaagagtggtgcccaggcaacatgggtgactggagcgccttaggcaaactccttgacaaggttcaagcctactcaactgctggagggaaggtgtggctgtcagtacttttcattttccgaatcctgctgctggggacagcggttgagtcagcctggggagatgagcagtctgcctttcgttgtaacactcagcaacctggttgtgaaaatgtctgctatgacaagtctttcccaatctctcatgtgcgcttctgggtcctgcagatcatatttgtgtctgtacccacactcttgtacctggctcatgtgttctatgtgatgcgaaaggaagagaaactgaacaagaaagaggaagaactcaaggttgcccaaactgatggtgtcaatgtggacatgcacttgaagcagattgagataaagaagttcaagtacggtattgaagagcatggtaaggtgaaaatgcgaggggggttgctgcgaacctacatcatcagtatcctcttcaagtctatctttgaggtggccttcttgctgatccagtggtacatctatggattcagcttgagtgctgtttacacttgcaaaagagatccctgcccacatcaggtggactgtttcctctctcgccccacggagaaaaccatcttcatcatcttcatgctggtggtgtccttggtgtccctggccttgaatatcattgaactcttctatgttttcttcaagggcgttaaggatcgggttaagggaaagagcgacccttaccatgcgaccagtggtgcgctgagccctgccaaagactgtgggtctcaaaaatatgcttatttcaatggctgctcctcaccaaccgctcccctctcgcctatgtctcctcctgggtacaagctggttactggcgacagaaacaattcttcttgccgcaattacaacaagcaagcaagtgagcaaaactgggctaattacagtgcagaacaaaatcgaatggggcaggcgggaagcaccatctctaactcccatgcacagccttttgatttccccgatgataaccagaattctaaaaaactagctgctggacatgaattacagccactagccattgtggaccagcgaccttcaagcagagccagcagtcgtgccagcagcagacctcggcctgatgacctggagatctagatacaggcttgaaagcatcaagattccactcaattgtggagaagaaaaaaggtgctgtagaaagtgcaccaggtgttaattttgatccggtggaggtggtactcaacagccttattcatgaggcttagaaaacacaaagacattagaatacctaggttcactgggggtgtatggggtagatgggtggagagggaggggataagagaggtgcatgttggtatttaaagtagtggattcaaagaacttagattataaataagagttccattaggtgatacatagataagggctttttctccccgcaaacacccctaagaatggttctgtgtatgtgaatgagcgggtggtaattgtggctaaatatttttgttttaccaagaaactgaaataattctggccaggaataaatacttcctgaacatcttaggtcttttcaacaagaaaaagacagaggattgtccttaagtccctgctaaaacattccattgttaaaatttgcactttgaaggtaagctttctaggcctgaccctccaggtgtcaatggacttgtgctactatatttttttattcttggtatcagtttaaaattcagacaaggcccacagaataagattttccatgcatttgcaaatacgtatattctttttccatccacttgcacaatatcattaccatcactttttcatcattcctcagctactactcacattcatttaatggtttctgtaaacatttttaagacagttgggatgtcacttaacattttttttttttgagctaaagtcagggaatcaagccatgcttaatatttaacaatcacttatatgtgtgtcgaagagtttgttttgtttgtcatgtattggtacaagcagatacagtataaactcacaaacacagatttgaaaataatgcacatatggtgttcaaatttgaacctttctcatggatttttgtggtgtgggccaatatggtgtttacattatataattcctgctgtggcaagtaaagcacactttttttttctcctaaaatgtttttccctgtgtatcctattatggatactggttttgttaattatgattctttattttctctcctttttttaggatatagcagtaatgctattactgaaatgaatttcctttttctgaaatgtaatcattgatgcttgaatgatagaattttagtactgtaaacaggctttagtcattaatgtgagagacttagaaaaaatgcttagagtggactattaaatgtgcctaaatgaattttgcagtaactggtattcttgggttttcctacttaatacacagtaattcagaacttgtattctattatgagtttagcagtcttttggagtgaccagcaactttgatgtttgcactaagattttatttggaatgcaagagaggttgaaagaggattcagtagtacacatacaactaatttatttgaactatatgttgaagacatctaccagtttctccaaatgccttttttaaaactcatcacagaagattggtgaaaatgctgagtatgacacttttcttcttgcatgcatgtcagctacataaacagttttgtacaatgaaaattactaatttgtttgacattccatgttaaactacggtcatgttcagcttcattgcatgtaatgtagacctagtccatcagatcatgtgttctggagagtgttctttattcaataaagttttaatttagtataaacat

SEQ ID NO: 117 - DNA, 4098 bp, Homo sapiens
atgctgcaaatgccgaagttaaatgaaatacctccggggagggcaggccgcagggaggctcggggggagggaagatggcctggacaaacaggtcctgaagctgcgaggctggagtggagggcgcaggggcaggcgggcggcgccagagctccatgggacagctggggaagctccaggctacctacacaacctggcccaggctggtcacggtgtcccccctccctgctctgtgccctctccttccagaaatccaccatggagagtaaggatgaggtcagcgacaccgacagtggcatcatcctgcagtctggccccgacagcccggtctccccaatgaaggagctgacccatgcagtgcacaagcagcagagggccctggaagcgaggctggaggcctgcctggaggagctgaggagactctgccttcgggaagcggagctgacgggcaccttgccagcggagtatcccctcaaaccaggggaaaaggcccccaaggttcgccgcaggatcggagcggcttacaaactggatgactgggccttgcacagagaggaccccctaagcagcctggagcgccagctggccctgcagctgcagatcacagaggcagcccgtcggctgtgcctggaggagaacctcagcaggcaggctcggcggcagcggaagcactccatgctgcaggaggagaagaagctgcaggagctccagcgctgcctggtcgagcggcggcgcaatagcgagccacctccggctgctgctctccccctgggccgagagctcagtgcctctgatgacagctccctgtcagatgggctcctcctggaggaagaggaatcccaagtgccaaaacctcctccagagtctccagccccaccttctcggcctctcccaccccaaacccttgagggtctgcagccaacaggacctgaggctgggagcccagaacgggctccagtccagaacagcccctggaaggaaaccagcctggaccacccctatgagaagcccaggaagtcttctgagccctggagcgagtccagcagcccagccaccacaccacaggatgggcccagtgcctccagcctgtggcttctggagcctgcctcctaccacgtggttcccatccgtggtgttcctggccagtggcagggccgcaccagtgccccagccacccctgagatacaggggaggaggggccagtcgcagtctctgagggtggattccttccgggcgggtcctgagggccgaggtcgcagcgcctttccccgccgccgccccactcactacacggtgacagtgccagattcctgctttcccgcgaccaagcccccgctgccccacgccgcctgccactcctgctcagaagacagtggctctgacgtctccagcatctcccaccccacttcgccgggcagcagcagccccgacatctcctttctgcagcctctctcccctcccaagacccatcgtcaccgcggggcctgggtcccagccggcagcagagagctggtcgcccaccaccccaagctactgctgccgcctggctatttcccggcggggcggtacgtggtggtggctgagagccccctgccgcctggcgagtgggagctgtgccgcgcagccccgggccctgcttacgaggaggagggcactcccctgcgctaccagcgtctggtgccctcccgcagccgcatcgtgcggacgccctccctgaaggacagcccggcaggccgggggctcagcaaggccgccgtgtccgaggagctcaagtggtggcacgagcgtgcacgcctccggagcacccgaccccactcactggaccgccaaggagctttccgggtcaggagcctgccccttgggagagagggcttcggacgagccctgggaccccgggcacaggtgcccacagtttgtgtgctgtggagatcgcctgatggggcccctgtgcaagtctttgtacctgaaaaaggagagatcatcagccaggtgtaactctgcgccccacgctggaaaaaactgtttcatagaggggctgggctgagacccccccacccctgagtgcctctttcagctcccccatccccatcgcaggccgatgacctggagctaagaccttttattattttttttttacacgacttttttcagaagccctgacctaaggatttatatatgtggattgtcctcaatacccctgtgatatgattatgttttatcccccagagtttggcctactggacttaaggccttgcctgtctgactgacagcctctatctccttatataagacaagtggcaggggacgagtgaagcagagtgagccaccttgggagttctccaacgctctgtgctctggttctaagaaattccctggggaactgcccctggccctcctgtcccactattgctggaggctggacatggtacatactcatgcacatgactctcccccatttcccaggtctctgggtaccccagcctgggctgggggagaatctcttcccccttttctaatgtgctctgtgatgcacacaccaagtggtaggtcaaaggtcagtatatcccggtggtgtattgtcttgctagaccctgctattttcctgaccccctaaatcctctttagggacccagtcactataccctgtctatgccctgtgggctcccagacccctgagctttgagtcagtggcatcacagtttgtagcctcagggggtctggctgggggctggtccatgcttgtggttagtggacagcagccaccctttgacagctacctctggacatctcaagggcttgcagccccactgctccttctaacattttgtttgtttttgagatggagtctcgctctgtcgcccaggctggaatgctgtagcaagatttcggctcactgcaacccccgtctcccgggttcaagcgaatctcctgcctcagccttctgagtagctgggattacaggcaagcaccaccatgcctgctaattttttatttttagtagagatggggtttcatcatgttggccaggctggtctcgaactcctgacctcaagtgatccacctgccttggcctttcaaagtgctgggattacaggcatgagccaccgcacctggcccttctaacgttttttcatcatagtcccaaaaaccaatactttacaagtggtttttgaaaggcaccacttttgtggcatgttctggttgggagagggagtcacagttcctactccccccaccagctatgcttctgctctgagaaggtggttatttatacaaacatggacatactcactcccaagggctgatgagatgctgaattttctttgggggcattcattaattgtcccagctgcagcgactggagcaagtctggaagctgcctgtgctaagaccacccagctgtccctgggttctcatcctagggccttctttgcttccaggtcaggggacctgcttcaatgagaaagcaactgaattgaggctaggagaggtagggagagctgagttctgacttcacctgtgcagaactctctgcccccatgttacctggactggaacagactgtgaatatagcagaaggttccaagaactctggtgtctgacctagaagaggcacagttctctctactggaaagaaaacgatgtagccgattgcacaagggtgccaagggaagacccaggatggcccatcaaaggaacctgggggaggatgcaggaggctgaagggatgcacctggcatttctctcactgtgctcttaccgcatcagcaacccccaacttttgggcctactctgccccccatgcgtgaataccctgcttggatgctgtgcttttccggtttgtctctaagcccctttctccagggcatgttggtttccctggcctctcagtgtcctaactggagcccagagtgccttgttctgagccaggagacggctgagcactggccctccacacctaagcgtcctttacattaacttattggtcttgtataacacctggtgccattgccaagtggctgtgtcctcagctacagagctggaattgtgtggggtttagtgctaaatacttcaataaagtctgttttttgtgattggctg

SEQ ID NO: 118 - DNA, 2742 bp, Homo sapiens
ctagtattctactagaactggaagattgctctccgagttttttttttgttattttgttaaaaaataaaaagcttgagcagcaattcatattactgtcacaggtatttttgctgtgctgtgcaaggtaactctgctagctaagattcacaatgttgaaagcccttttcctaactatgctgactctggcgctggtcaagtcacaggacaccgaagaaaccatcacgtacacgcaatgcactgacggatatgagtgggatcctgtgagacagcaatgcaaagatattgatgaatgtgacattgtcccagacgcttgtaaaggtggaatgaagtgtgtcaaccactatggaggatacctctgccttccgaaaacagcccagattattgtcaataatgaacagcctcagcaggaaacacaaccagcagaaggaacctcaggggcaaccaccggggttgtagctgccagcagcatggcaaccagtggagtgttgcccgggggtggttttgtggccagtgctgctgcagtcgcaggccctgaaatgcagactggccgaaataactttgtcatccggcggaacccagctgaccctcagcgcattccctccaacccttcccaccgtatccagtgtgcagcaggctacgagcaaagtgaacacaacgtgtgccaagacatagacgagtgcactgcagggacgcacaactgtagagcagaccaagtgtgcatcaatttacggggatcctttgcatgtcagtgccctcctggatatcagaagcgaggggagcagtgcgtagacatagatgaatgtaccatccctccatattgccaccaaagatgcgtgaatacaccaggctcattttattgccagtgcagtcctgggtttcaattggcagcaaacaactatacctgcgtagatataaatgaatgtgatgccagcaatcaatgtgctcagcagtgctacaacattcttggttcattcatctgtcagtgcaatcaaggatatgagctaagcagtgacaggctcaactgtgaagacattgatgaatgcagaacctcaagctacctgtgtcaatatcaatgtgtcaatgaacctgggaaattctcatgtatgtgcccccagggataccaagtggtgagaagtagaacatgtcaagatataaatgagtgtgagaccacaaatgaatgccgggaggatgaaatgtgttggaattatcatggcggcttccgttgttatccacgaaatccttgtcaagatccctacattctaacaccagagaaccgatgtgtttgcccagtctcaaatgccatgtgccgagaactgccccagtcaatagtctacaaatacatgagcatccgatctgataggtctgtgccatcagacatcttccagatacaggccacaactatttatgccaacaccatcaatacttttcggattaaatctggaaatgaaaatggagagttctacctacgacaaacaagtcctgtaagtgcaatgcttgtgctcgtgaagtcattatcaggaccaagagaacatatcgtggacctggagatgctgacagtcagcagtatagggaccttccgcacaagctctgtgttaagattgacaataatagtggggccattttcattttagtcttttctaagagtcaaccacaggcatttaagtcagccaaagaatattgttaccttaaagcactattttatttatagatatatctagtgcatctacatctctatactgtacactcacccataacaaacaattacaccatggtataaagtgggcatttaatatgtaaagattcaaagtttgtctttattactatatgtaaattagacattaatccactaaactggtcttcttcaagagagctaagtatacactatctggtgaaacttggattctttcctataaaagtgggaccaagcaatgatgatcttctgtggtgcttaaggaaacttactagagctccactaacagtctcataaggaggcagccatcataaccattgaatagcatgcaagggtaagaatgagtttttaactgctttgtaagaaaatggaaaaggtcaataaagatatatttctttagaaaatggggatctgccatatttgtgttggtttttattttcatatccagcctaaaggtggttgtttattatatagtaataaatcattgctgtacaacatgctggtttctgtagggtatttttaattttgtcagaaattttagattgtgaatattttgtaaaaaacagtaagcaaaattttccagaattcccaaaatgaaccagataccccctagaaaattatactattgagaaatctatggggaggatatgagaaaataaattccttctaaaccacattggaactgacctgaagaagcaaactcggaaaatataataacatccctgaattcaggcattcacaagatgcagaacaaaatggataaaaggtatttcactggagaagttttaatttctaagtaaaatttaaatcctaacacttcactaatttataactaaaatttctcatcttcgtacttgatgctcacagaggaagaaaatgatgatggtttttattcctggcatccagagtgacagtgaacttaagcaaattaccctcctacccaattctatggaatattttatacgtctccttgtttaaaatctgactgctttactttgatgtatcatatttttaaataaaaataaatattcctttagaagatcactctaaaa

SEQ ID NO: 119 - DNA, 2772 bp, Homo sapiens
atggagagggggctgccgctcctctgcgccgtgctcgccctcgtcctcgccccggccggcgcttttcgcaacgatgaatgtggcgatactataaaaattgaaagccccgggtaccttacatctcctggttatcctcattcttatcacccaagtgaaaaatgcgaatggctgattcaggctccggacccataccagagaattatgatcaacttcaaccctcacttcgatttggaggacagagactgcaagtatgactacgtggaagtcttcgatggagaaaatgaaaatggacattttaggggaaagttctgtggaaagatagcccctcctcctgttgtgtcttcagggccatttctttttatcaaatttgtctctgactacgaaacacatggtgcaggattttccatacgttatgaaattttcaagagaggtcctgaatgttcccagaactacacaacacctagtggagtgataaagtcccccggattccctgaaaaatatcccaacagccttgaatgcacttatattgtctttgcgccaaagatgtcagagattatcctggaatttgaaagctttgacctggagcctgactcaaatcctccaggggggatgttctgtcgctacgaccggctagaaatctgggatggattccctgatgttggccctcacattgggcgttactgtggacagaaaacaccaggtcgaatccgatcctcatcgggcattctctccatggttttttacaccgacagcgcgatagcaaaagaaggtttctcagcaaactacagtgtcttgcagagcagtgtctcagaagatttcaaatgtatggaagctctgggcatggaatcaggagaaattcattctgaccagatcacagcttcttcccagtatagcaccaactggtctgcagagcgctcccgcctgaactaccctgagaatgggtggactcccggagaggattcctaccgagagtggatacaggtagacttgggccttctgcgctttgtcacggctgtcgggacacagggcgccatttcaaaagaaaccaagaagaaatattatgtcaagacttacaagatcgacgttagctccaacggggaagactggatcaccataaaagaaggaaacaaacctgttctctttcagggaaacaccaaccccacagatgttgtggttgcagtattccccaaaccactgataactcgatttgtccgaatcaagcctgcaacttgggaaactggcatatctatgagatttgaagtatacggttgcaagataacagattatccttgctctggaatgttgggtatggtgtctggacttatttctgactcccagatcacatcatccaaccaaggagacagaaactggatgcctgaaaacatccgcctggtaaccagtcgctctggctgggcacttccacccgcacctcattcctacatcaatgagtggctccaaatagacctgggggaggagaagatcgtgaggggcatcatcattcagggtgggaagcaccgagagaacaaggtgttcatgaggaagttcaagatcgggtacagcaacaacggctcggactggaagatgatcatggatgacagcaaacgcaaggcgaagtcttttgagggcaacaacaactatgatacacctgagctgcggacttttccagctctctccacgcgattcatcaggatctaccccgagagagccactcatggcggactggggctcagaatggagctgctgggctgtgaagtggaagcccctacagctggaccgaccactcccaacgggaacttggtggatgaatgtgatgacgaccaggccaactgccacagtggaacaggtgatgacttccagctcacaggtggcaccactgtgctggccacagaaaagcccacggtcatagacagcaccatacaatcagagtttccaacatatggttttaactgtgaatttggctggggctctcacaagaccttctgccactgggaacatgacaatcacgtgcagctcaagtggagtgtgttgaccagcaagacgggacccattcaggatcacacaggagatggcaacttcatctattcccaagctgacgaaaatcagaagggcaaagtggctcgcctggtgagccctgtggtttattcccagaactctgcccactgcatgaccttctggtatcacatgtctgggtcccacgtcggcacactcagggtcaaactgcgctaccagaagccagaggagtacgatcagctggtctggatggccattggacaccaaggtgaccactggaaggaagggcgtgtcttgctccacaagtctctgaaactttatcaggtgattttcgagggcgaaatcggaaaaggaaaccttggtgggattgctgtggatgacattagtattaataaccacatttcacaagaagattgtgcaaaaccagcagacctggataaaaagaacccagaaattaaaattgatgaaacagggagcacgccaggatacgaaggtgaaggagaaggtgacaagaacatctccaggaagccaggcaatgtgttgaagaccttagaacccatcctcatcaccatcatagccatgagcgccctgggggtcctcctgggggctgtctgtggggtcgtgctgtactgtgcctgttggcataatgggatgtcagaaagaaacttgtctgccctggagaactataactttgaacttgtggatggtgtgaagttgaaaaaagacaaactgaatacacagagtacttattcggaggcatga

SEQ ID NO: 120 - DNA, 1332 bp, Homo sapiens
ctgctggctcacctccgagccacctctgctgcgcaccgcagcctcggacctacagcccaggatactttgggacttgccggcgctcagaaacgcgcccagacggcccctccaccttttgtttgcctagggtcgccgagagcgcccggagggaaccgcctggccttcggggaccaccaattttgtctggaaccaccctcccggcgtatcctactccctgtgccgcgaggccatcgcttcactggaggggtcgatttgtgtgtagtttggtgacaagatttgcattcacctggcccaaaccctttttgtctctttgggtgaccggaaaactccacctcaagttttcttttgtggggctgccccccaagtgtcgtttgttttactgtagggtctcccgcccggcgcccccagtgttttctgagggcggaaatggccaattcgggcctgcagttgctgggcttctccatggccctgctgggctgggtgggtctggtggcctgcaccgccatcccgcagtggcagatgagctcctatgcgggtgacaacatcatcacggcccaggccatgtacaaggggctgtggatggactgcgtcacgcagagcacggggatgatgagctgcaaaatgtacgactcggtgctcgccctgtccgcggccttgcaggccactcgagccctaatggtggtctccctggtgctgggcttcctggccatgtttgtggccacgatgggcatgaagtgcacgcgctgtgggggagacgacaaagtgaagaaggcccgtatagccatgggtggaggcataattttcatcgtggcaggtcttgccaccttggtagcttgctcctggtatggccatcagattgtcacagacttttataaccctttgatccctaccaacattaagtatgagtttggccctgccatctttattggctgggcagggtctgccctagtcatcctgggaggtgcactgctctcctgttcctgtcctgggaatgagagcaaggctgggtaccgtgcaccccgctcttaccctaagtccaactcttccaaggagtatgtgtgacctgggatctccttgccccagcctgacaggctatgggagtgtctagatgcctgaaagggcctggggctgagctcagcctgtgggcagggtgccggacaaaggcctcctggtcactctgtccctgcactccatgtatagtcctcttgggttgggggtgggggggtgccgttggtgggagagacaaaaagagggagagtgtgctttttgtacagtaataaaaaataagtattgggaaaaaaaaaaaaaaaaaaaaaaaaaaaaaaaaaaaaa

SEQ ID NO: 121 - DNA, 3277 bp, Homo sapiens
  misc_feature (156)..(156): n is a, c, g, or t
ggtgatgagcccttgggttctcgctccgactgctaaattcgcttggccgggtccaccttctcgtggcctcactcgccacacggatcagaatccggagcaggcagttctctctattctgaggctcctgcggctgccgcgctgacttccctgtgtggnggagggaactctgggcaggctggttttcttggaatgtgtttacgatgttgaatgggacttgaacaggaagctggacgctgcagctggaactagcgtgccaagttatttatgattccatctgatatacataggagagaaactgatgaagaattctgatggcaactgtatgatagaagctatataaagtcaagtgtccattttctttcaactatatttgagcatacccaggatttaagtcgtggaactgaacatttatttggctgatcctcatcatgaaccgtgcttttagcaggaagaaagacaaaacatggatgcatacacctgaagctttatcaaaacatttcattccctataatgcaaagtttcttggcagtacagaagtggaacagccaaaaggaacagaagttgtgagagatgctgtaaggaaactaaagtttgcaagacatatcaagaaatctgaaggccagaaaattcctaaagtggagttgcaaatatcaatttatggagtaaaaattctagaacccaaaacaaaggaagttcaacacaattgccagcttcatagaatatctttttgtgcagatgataaaactgacaagaggatattcactttcatatgcaaagattctgagtcaaataaacatttgtgctatgtatttgacagcgaaaagtgtgctgaagagatcactttaacaattggccaagcatttgacctggcatacaggaaatttctagaatcaggaggaaaagatgttgaaacaagaaaacagatcgcagggttacaaaaaagaatccaagacttagaaacagaaaatatggaacttaaaaataaagtacaagatttggaaaaccaactgagaataactcaagtatcagcacctccagcaggcagtatgacacctaagtcgccctccactgacatctttgatatgattccattttctccaatatcacaccagtcttcgatgcctactcgcaatggcacacagccacctccagtacctagtagatctactgagattaaacgggacctgtttggagcagaaccttttgacccatttaactgtggagcagcagatttccctccagatattcaatcaaaattagatgagatgcaggaggggttcaaaatgggactaactcttgaaggcacagtattttgtctcgacccgttagacagtaggtgctgacatcaagaacaagaaatcctgattcatgttaaatgtgtttgtatacacatgtcatttattattattactttaagataggtattattcatgtgtcaatgtttttgaatattttaatattttgaaaattttctcagttaaatttcctcaccttcactattgatctgtaatttttattttaaaaacagcttactgtaaagtagatcatacttttatgttcctttctgtttctactgtagatgaatttgtaattgaaagacatattatacaaatacctgccttgtgtctgagttctatttagttagcatcttgaaatttgtattcattttccagatggctagtttattaatgatttcccaaaagccataccttaaagataactttttaaattctgaagagacatgccaatgtcaaactaaacatgttctgtttttaaaccaacaaacatgttactattcattggacagatatcattttatgtataaatactgttcacatcactgggaaaatgtaaactttaacataatgccacaaggtcactaatttctagcaggtaaaattataaggatataaattccaataataaaccaaatgtatttagagtatttattagtaaatgcaaggtgatgttagttatgatcagttatactctaaatatttaatttgttttataaaggtagtgaaaaaatgaaaatttgctatttattaaaaaacattaaatttcattccaaatgagataagtgatattactataacatctaagcatcatctgatttgatattccctaaaaaacatttggaatatatgctatctatagattcagtatctactacccatatttactttaccaaatatatttctcctcactgcataaggactactcttctcatattttcttctttgatgaagatatttttcaccaaagtttattttgtgatgccctcttggttttgatactttaaaatctgtggcacccgttctacatgaattatcaatatttggtaaattcaatctgtatttgttttgttaaagtcaaaaatctcattttccaaaaaaaaaaaaaaaacccagttactgctcagtttagtcttgaacatgagcaataaaattctcttgcatttcattattgatgtgctgatgaacctggacttttaaaaatatttgtttcctatacctttaccctttacctaacagactaatttgtactcagtaaaacaaaaatttatggtcaaaatttctaacttggttcatcacattataagataaataaattaaattaatgaaaatgtgacttagagtaggggtagccctcaaaaatagatttatcatttactcattggaattttcttcaagtgttaaaggtacattttcactaggaaaagaaatcaaatatgcttatgcaatatatatttgtgtgtttttccttaatgttatatggtatatatgagccttcttgtttagtttcttttatctgctaagttgtaccttaattagagggcaatatatgtttcataaagaagagtctttataattttgtttgtcagatagtattttggaatttgtataataaggatgtttagaagccatataagtggctttttttaacagatagaatttgtatttttattgtactttaaaaagatttatgtaataggtatatatttagtggccatttattatcaatggtaacacaatggagtactaagatggtatttgcacatttaagatatgttactttaccaatttttaatggtaatcaactctgctactggcatgatgaaatagtacataactggtcattaattatgaacatttacttctccagtgcgtttttatgaagatctggttgaaaattgtatttctatgtaaactcaacgatatgtttggttttcctgaaaataaatgattttaaataaaaaaaaaaaaaaaaaaaaaaa

SEQ ID NO: 122 - DNA, 11185 bp, Homo sapiens; identical to SEQ ID NO: 45

SEQ ID NO: 123 - DNA, 3052 bp, Homo sapiens; identical to SEQ ID NO: 95

SEQ ID NO: 124 - DNA, 3396 bp, Homo sapiens
cctttaagagcggctggccaggcacggcctccgcctctcagtacgcggagcgccggcggtcacctggggctcgcggagcggccagatcgcggcggagtcggcgcgcttccccgagggaaggtgggagaggggacccggacgcgaggtgccccgaagccctctcgagcgtaaccgtcccgcgcctctctgaggcggaggatgcgggagcgcatctgggcgccgccgctgctgctgctgctgccgctgctactgccgccgccactgtggggcggccccccggacagcccacgccgggagctggagctggagcccgggcctctgcagcccttcgacctgctctacgccagcggcgcggccgcctactacagcggagactacgagcgagcggtgcgcgacttggaagcggcgctgcgcagccaccggcgcctgcgggaaatccgcacgcgctgtgcccgccactgcgcggcgcgccacccgctcccgcccccgccccccggcgagggccccggcgctgagctgccccttttccgctccttgttggggcgggcgcgctgttatcgcagctgtgagacccagcgcctcgggggccccgcatcccgccaccgcgtcagcgaggatgtgcgcagcgacttccagcgcagagtgccctacaactacctgcagcgggcctacatcaagcttaaccagctcgaaaaagcagtggaagcagctcacacatttttcgtggctaaccctgagcacatggaaatgcagcagaacattgagaattacagggcgacagctggtgttgaagcattgcagttggtagacagagaagccaagccacacatggagagttacaatgcaggagttaaacattatgaggctgatgactttgagatggctatcaggcatttcgaacaagccttaagagaatatttcgttgaagatacagaatgccggaccctatgtgaggggcctcagagatttgaagaatatgagtatttagggtataaggctggtctgtatgaagctattgcagatcactacatgcaggtgcttgtttgtcagcatgaatgtgtgagggaacttgccacccgccctggccgcctctctcccatcgagaattttcttcctctgcactatgattacctacagtttgcctactatcgagttggtgagtatgtgaaagccctggagtgtgccaaagcctatcttctatgccatccagatgatgaggatgtcctagacaatgtggattactatgagagtctgctggatgatagcattgacccggcatccattgaggccagagaggatttaacaatgtttgtgaaacgtcataagctggagtctgagctgataaaatcagctgcagaaggtctggggttttcatacactgaaccgaattattggatcagatatggaggacgacaggatgagaatcgggtcccttcaggagtgaacgtagagggagcagaagttcatggattctcaatgggaaaaaagctatcacccaagatagatcgagacctaagagaaggtggtcctctactctatgagaacatcacattcgtctacaactcggagcagctgaacgggactcagcgggttctcctggataacgtcctgtcggaagaacagtgccgggagctccacagcgtggccagtggaatcatgcttgttggtgatggatacagaggaaaaacttcaccccatacacccaatgaaaagtttgaaggtgcaactgtcctgaaagcactcaaatctggttatgaaggtcgagtcccactgaagagcgctcgtctgttttatgacatcagcgaaaaggctcgaaggattgtagaatcttattttatgctgaactcaactctgtatttttcctatacacacatggtctgccgaacagccctgtctggtcagcaggatagaagaaatgacctcagtcatcccatccatgctgacaactgtttgttggatccagaggccaacgaatgctggaaggagcctcctgcttacacatttcgagactatagtgctctcctatatatgaatgatgactttgaaggaggagaattcatattcacagagatggatgctaagactgtgactgcctctataaaaccaaaatgtgggcgcatgatcagcttctcatctggaggagagaaccctcatggggtgaaggcagtcaccaagggaaagaggtgtgctgtggctctgtggttcaccttggacccactttatagagaattggagcgaatacaggctgatgaagtgattgcaattctggatcaagaacagcaagggaagcatgaactgaatatcaaccctaaagatgagctataaaaatgagaaagaatgttctatcaaatatttatttaaattgttaatcttatgagaacctttttatttttgtacagagccatggtataaattaacaggttaatgtcagtcatcagatcttccttctcttcctaaggatgcttgtgttgcctcaatctatcaatctatctttcttgttttgggttgttttctctctctctctctctctctcttcttagagacatggtctaaccatgttgtctaggatatagggcagtggctattcacagatgtgatgatagcacactggagcctcaaactcttaggctcaggcgatccttcaagcctcccggggagctgggaccacaggcacgtgccaccacacccagctctctttcttggtttttcatcatttcatgtatctatcaaagcccagttcacctcctcccccaaacacacacacacacacacacacacacacacacaattaagttgctgcagattcaaaagcttagagagaataagcttcttggtggtgaaactacaactctcacgtgtgctccagttctaaaattaacctgtgcctggtctctgaagccctttcttgctctgtgcctttcagccacatccttaggtgctaacggccatgagctccgactctccaaagtgagctccactttgggtctgaggagcccctggcagagtccacgctgcctcaggtatcatgggcgtaatgatcacccaggctccgggagatctcatggatgattactgtatgagacagaggggacttcagtctttccagggccttggtggaatttttggctctggtgttttcgccagacaataaacttacactggaagctttgatccaccctccacagtactccagaaaggactgtcctataagttgtacactttaaaaggtcatgtagaggttgtagtagaatggcttttcaccctggtgactttggaagaaactcttgaatactgcctgcatccgggcaccatggccaggttgcctaggagtggggtccactgatgaaaagaggtgttttgtacttacataagaaaaataaatttctgattgatttt

SEQ ID NO: 125 - DNA, 1256 bp, Homo sapiens
gaggaatgcggtcgcccccttgggaaagtacatatctgggagaagcaggcggctccgcgctcgcactcccgctcctccgcccgaccgcgcgctcgccccgccgctcctgctgcagccccagggcccctcgccgccgccaccatggacgccatcaagaagaagatgcagatgctgaagctcgacaaggagaacgccttggatcgagctgagcaggcggaggccgacaagaaggcggcggaagacaggagcaagcagctggaagatgagctggtgtcactgcaaaagaaactcaagggcaccgaagatgaactggacaaatattctgaggctctcaaagatgcccaggagaagctggagctggcagagaaaaaggccaccgatgctgaagccgacgtagcttctctgaacagacgcatccagctggttgaggaagagttggatcgtgcccaggagcgtctggcaacagctttgcagaagctggaggaagctgagaaggcagcagatgagagtgagagaggcatgaaagtcattgagagtcgagcccaaaaagatgaagaaaaaatggaaattcaggagatccaactgaaagaggcaaagcacattgctgaagatgccgaccgcaaatatgaagaggtggcccgtaagctggtcatcattgagagcgacctggaacgtgcagaggagcgggctgagctctcagaaggccaagtccgacagctggaagaacaattaagaataatggatcagaccttgaaagcattaatggctgcagaggataagtactcgcagaaggaagacagatatgaggaagagatcaaggtcctttccgacaagctgaaggaggctgagactcgggctgagtttgcggagaggtcagtaactaaattggagaaaagcattgatgacttagaagacgagctgtacgctcagaaactgaagtacaaagccatcagcgaggagctggaccacgctctcaacgatatgacttccatgtaaacgttcatccactctgcctgcttacaccctgccctcatgctaatataagtttctttgcttcacttctcccaagactccctcgtcgagctggatgtcccacctctctgagctctgcatttgtctattctccagctgaccctggttctctctcttagcatcctgccttagagccaggcacacactgtgctttctattgtacagaagctcttcgtttcagtgtcaaataaacactgtgtaagctaaaaaaaaaaaaaaaaaaa

SEQ ID NO: 126 - DNA, 587 bp, Homo sapiens
taaatcttttctgcttactgaaaaggaagagtctgatgattagttactgatcctctttgcatttgtaaagctttggagatattgaatcatgttaccatttctgtttttttccaccctgttttcttccatatttactgaagctcagaagcagtattgggtctgcaactcatccgatgcaagtatttcatacacctactgtgataaaatgcaatacccaatttcaattaatgttaacccctgtatagaattgaaaggatccaaaggattattgcacattttctacattccaaggagagatttaaagcaattatatttcaatctctatataactgtcaacaccatgaatcttccaaagcgcaaagaagttatttgccgaggatctgatgacgattactctttttgcagagctctgaagggagagactgtgaatacaacaatatcattctccttcaagggaataaaattttctaagggaaaatacaaatgtgttgttgaagctatttctgggagcccagaagaaatgctcttttgcttggagtttgtcatcctacaccaacctaattcaaattagaataaattgagtattt

SEQ ID NO: 127 - DNA, 4164 bp, Homo sapiens; identical to SEQ ID NO: 19

SEQ ID NO: 128 - DNA, 3981 bp, Homo sapiens
cgggctgagagggacctggggagctgcggcctggccggggcggcgcactcaggtggcctcgcttccctgcgggtcaccgcccgccactcgcacagctaggtcggcctgttgggatcgggagaggtgggcgcacgagttttagtgcgggagtccggggtgcgggcggagtcctattgtccccgtgcacccgggcggcagcacctccgggtccctctttaaaccgagcgtccggcgacctttctttgtgcttagggagtcgaaagcggcatcttctccgagagaagtcgcctactggggggtggcgctggggaggtaacaatgggcgcccattgtcctccgagggtccaacggtgacccccccccgcgcgcgcgcccggccaccggttggccccgggccagggcacaggtaccgcggctgggagggtcggccccgctgcccgcgccctccgccccgccccagtgagtccccgcgccgccggccccgccccgcgccgccccgccctccgcaggttcagtcctcgcgtccggccgccccgcgctcagtcgcgcgcaccttctctcgcggccgggggaccgcagcgcggggctagcccggagacccggccaccggcctggggcgccttcacgccgtctcggagcggataatgcggtgagcaggcaccacgccggcagactcggctggatctgcgcacagcggcagggattgcgtgcgcccgcgggaggcccggggcagcggctgggatcctcagcggcggccggtttgtcctggttgtggtcaagactggatgatgtaactggctctctaggaagcctcacttggccgtaacctcaggaaggttctctttgaccccatctcatttcgaagccacttctgaagccacttgagaaaaatgatgtgacagttcctatcaaaaaggattcagaaacatataccatctgtgaagaaagtggccctttctcccgcttgcaaaatagacattctcaaattccaaaatgccagccaagaccccaatttacctgaaagcagccaataacaagaaaggaaagaaatttaaactgagggacattctgtctcctgatatgatcagtcccccgcttggagactttcgccacaccatccacattggcaaagagggccagcacgatgtctttggagatatttcctttcttcaagggaactacgagcttttacctggaaaccaggagaaagcacacctgggccagttccctgggcataatgagttcttccgggccaacagcacctcggactctgtgttcacagaaacgccctccccggtgctcaaaaatgccatctccctcccgaccattggaggatcccaagctctcatgttgcccttattgtcaccagtgacatttaattccaaacaggagtccttcgggccagcaaagctgcccaggcttagctgcgagcccgtcatggaggaaaaagctcaggagaaaagcagtctgttggagaatgggacagtccaccagggagacacctcgtggggctccagcggttctgcatctcagtccagccaaggcagagacagccactcctccagcctgtccgaacagtaccccgactggccagccgaggacatgtttgaccatcccaccccatgcgagctcatcaagggaaagactaagtcagaggagtccctctctgaccttacaggttccctcctctccctgcagcttgatcttgggccctcacttttggatgaggtgctgaatgtaatggataaaaataagtaacaagatgccaacttttttcctttggggtaaaaggtacaaaaacaaactaaccacagttgaagagaagggcttccggagctgtatttgcagttttgtgttgggttttctaaaataatattcttacaaagtatttttttacctgttatgccctgtttgcaaaaacaatttagaaaaaaacaacaaagcaaaacctatcttggcaaaaaaaggaagtgagtcagagcccattttcaggaggcattggtgatgttcggctcacatattgtttgcagacacacaagaaatctggcttggccaggattggcactagctatgaagggctgagcgagtcacattaaggaacttcacggaactttatagcactccgacattttctgagcaagaggaagtcaaaatttatttaacacctaagcctttttgtagactcttttctatatattgcttaggctcaccatagcgaattctccagtgttaaaacttttctgttttcacatttgaactttatgggttttggggattttcttgtagttcttatatatccctatatattatatctatattgcaaaattttgactgtcagctacatgttggtaagacacaggcaaagtattactgtaactaagttatttttaaagttaaaatatatttttacgtgcctttggctttttattgcagagtctacattttatagattctacatcagatgttgtcacttatttccattgggattccattgtaagctgtgtatgtgcgtgtttggaaaagtgtattcatacttagtttttttttcttcatctgttatcatacttttaacagcaaccaataacggattgtaaagtgtaaaggcacaggttactcatgatgcttctgcagagactgtgggctacaccacatatgttatttggaaatataggtattttagtacagtacatacttgcattacataggtacttcaagcaacacaataaaaagtaaatgataaagtgaacttgcttgtttatagtaataaacaagaccataagagaataagtatagctagagaaattgcttctctgaaatgtacatgagcccttaaggtaagagatgatttccatctactctcattttgattacttccttatggtttgagaggctagaaactgagcctctctacttttggaaaaatgaacatgtgaggtcagatttttttttttttttttaagtcagcactgatgccaccctctcagtggtcatttctgagcatcttcctgacttgaacaccttctacagcaaactcttgcaagtccagtttcatccctgtaaggcaaatgtcttttcacgcagaaagtgccatatagacgagataaaggcagctaaaacgagggcagtagagagcacttacccgaccccaaggtgccagagatgccctgaggatggtggttaaggaaacaggagcaggaaatgtacacacagattcctgtccctttgccaactactccttccccatcaaagaaaaacacttgcacacagtaactaccagctccttctctcaaacttgtatttctcctggaaatgtatctcagaaatgacctcctctcccaaccacttcaacgattctttctttgggtttggggttcttgcagttctatcatctaaaataacctttggactgcaggtaaaatgcaattaggacaactaaccaagtagacgaaacaagttcccctaggcaggggtgtccaatattttagcttccctggaccgcattggaagaattttcttgggccacatgtaaaacacactaacactaaccatagttgatgagcttaaaaaaataaaaatagaaaattgcaaaaaaaaaaaaaaaaaaaaatctcagactgttttaagaaagtttaaaaatttgtgttggacttcatgcgggccacaggttggacaagcttgccctagggcattgtgtgctttccgtaacttctcagttgtatttcgttatccatgactctccagtgttttttctgttggaccacacccgtcacagttcacagttccaaagagaaatttcccagcctattctaaatcttgttaatgacgaagagtccaatgtatctcattatttgtagccaattttagactcttttcaatacctcccccccattttaattagtattgatcatattcagtctttcattttactcttcatctgtagcgtgacctcaaggtaaagatgaaactatttcatgaaaaggg

SEQ ID NO: 129 - DNA, 1040 bp, Homo sapiens; identical to SEQ ID NO: 2

SEQ ID NO: 130 - DNA, 4122 bp, Homo sapiens
tttgtcatcagctcgctctccattggcggggagcggagagcagcgaagaagggggtggggaggggaggggaagggaagggggtggaaactgcctggagccgtttctccgcgccgctgttggtgctgccgctgcctcctcctcctccgccgccgccgccgccgccgccgcctcctccggctcttcgctcggcccctctccgcctccatgtgccggatagcgggagcgctgcggaccctgctgccgctgctggcggccctgcttcaggcgtctgtagaggcttctggtgaaatcgcattatgcaagactggatttcctgaagatgtttacagtgcagtcttatcgaaggatgtgcatgaaggacagcctcttctcaatgtgaagtttagcaactgcaatggaaaaagaaaagtacaatatgagagcagtgagcctgcagattttaaggtggatgaagatggcatggtgtatgccgtgagaagctttccactctcttctgagcatgccaagttcctgatatatgcccaagacaaagagacccaggaaaagtggcaagtggcagtaaaattgagcctgaagccaaccttaactgaggagtcagtgaaggagtcagcagaagttgaagaaatagtgttcccaagacaattcagtaagcacagtggccacctacaaaggcagaagagagactgggtcatccctccaatcaacttgccagaaaactccaggggaccttttcctcaagagcttgtcaggatcaggtctgatagagataaaaacctttcactgcggtacagtgtaactgggccaggagctgaccagcctccaactggtatcttcattatcaaccccatctcgggtcagctgtcggtgacaaagcccctggatcgcgagcagatagcccggtttcatttgagggcacatgcagtagatattaatggaaatcaagtggagaaccccattgacattgtcatcaatgttattgacatgaatgacaacagacctgagttcttacaccaggtttggaatgggacagttcctgagggatcaaagcctggaacatatgtgatgaccgtaacagcaattgatgctgacgatcccaatgccctcaatgggatgttgaggtacagaatcgtgtctcaggctccaagcaccccttcacccaacatgtttacaatcaacaatgagactggtgacatcatcacagtggcagctggacttgatcgagaaaaagtgcaacagtatacgttaataattcaagctacagacatggaaggcaatcccacatatggcctttcaaacacagccacggccgtcatcacagtgacagatgtcaatgacaatcctccagagtttactgccatgacgttttatggtgaagttcctgagaacagggtagacatcatagtagctaatctaactgtgaccgataaggatcaaccccatacaccagcctggaacgcagtgtacagaatcagtggcggagatcctactggacggttcgccatccagaccgacccaaacagcaacgacgggttagtcaccgtggtcaaaccaatcgactttgaaacaaataggatgtttgtccttactgttgctgcagaaaatcaagtgccattagccaagggaattcagcacccgcctcagtcaactgcaaccgtgtctgttacagttattgacgtaaatgaaaacccttattttgcccccaatcctaagatcattcgccaagaagaagggcttcatgccggtaccatgttgacaacattcactgctcaggacccagatcgatatatgcagcaaaatattagatacactaaattatctgatcctgccaattggctaaaaatagatcctgtgaatggacaaataactacaattgctgttttggaccgagaatcaccaaatgtgaaaaacaatatatataatgctactttccttgcttctgacaatggaattcctcctatgagtggaacaggaacgctgcagatctatttacttgatattaatgacaatgcccctcaagtgttacctcaagaggcagagacttgcgaaactccagaccccaattcaattaatattacagcacttgattatgacattgatccaaatgctggaccatttgcttttgatcttcctttatctccagtgactattaagagaaattggaccatcactcggcttaatggtgattttgctcagcttaatttaaagataaaatttcttgaagctggtatctatgaagttcccatcataatcacagattcgggtaatcctcccaaatcaaatatttccatcctgcgcgtgaaggtttgccagtgtgactccaacggggactgcacagatgtggacaggattgtgggtgcggggcttggcaccggtgccatcattgccatcctgctctgcatcatcatcctgcttatccttgtgctgatgtttgtggtatggatgaaacgccgggataaagaacgccaggccaaacaacttttaattgatccagaagatgatgtaagagataatattttaaaatatgatgaagaaggtggaggagaagaagaccaggactatgacttgagccagctgcagcagcctgacactgtggagcctgatgccatcaagcctgtgggaatccgacgaatggatgaaagacccatccacgctgagccccagtatccggtccgatctgcagccccacaccctggagacattggggacttcattaatgagggccttaaagcggctgacaatgaccccacagctccaccatatgactccctgttagtgtttgactatgaaggcagtggctccactgctgggtccttgagctcccttaattcctcaagtagtggtggtgagcaggactatgattacctgaacgactgggggccacggttcaagaaacttgctgacatgtatggtggaggtgatgactgaacttcagggtgaacttggtttttggacaagtacaaacaatttcaactgatattcccaaaaagcattcagaagctaggctttaactttgtagtctactagcacagtgcttgctggaggctttggcataggctgcaaaccaatttgggctcagagggaatatcagtgatccatactgtttggaaaaacactgagctcagttacacttgaattttacagtacagaagcactgggattttatgtgcctttttgtacctttttcagattggaattagttttctgtttaaggctttaatggtactgatttctgaaacgataagtaaaagacaaaatattttgtggtgggagcagtaagttaaaccatgatatgcttcaacacgcttttgttacattgcatttgcttttattaaaatacaaaattaaacaaacaaaaaaactcatggagcgattttattatcttgggggatgagaccatgagattggaaaatgtacattacttctagttttagactttagtttgttttttttttttcactaaaatcttaaaacttactcagctggttgcaaataaagggagttttcatatcaccaatttgtagcaaaattgaattttttcataaactagaatgttagacacattttggtcttaatccatgtacacttttttatttctgtatttttccacttcactgtaaaaatagtatgtgtacataatgttttattggcatagtctatggagaagtgcagaaacttcagaacatgtgtatgtattatttggactatggattcaggttttttgcatgtttatatctttcgttatggataaagtatttacaaaacagtgacatttgattcaattgttgagctgtagttagaatactcaatttttaatttttttaatttttttattttttattttctttttggtttggggagggagaaaagttcttagcacaaatgttttacataatttgtaccaaaaaaaaaaaaaaggaaaggaaagaaaggggtggcctgacactggtggcactactaagtgtgtgttttttaaaaaaaaaaatggaaaaaaaaaagcttttaaactggagagacttctgacaacagctttgcctctgtattgtgtaccagaatataaatgatacacctctgaccccagcgttctgaataaaatgctaattttggaaaaaaaaaaaaaaaaa

SEQ ID NO: 131 - DNA, 3426 bp, Homo sapiens
ttcaggaaccgggttggcgaatcgagttgccaggtgtcactgatgctacagaacagctctgccagcagccttccacgggggagggagcctgccagctgcgaggacctctgtggtggaggagttggtgctgatggtggtggtagtgaccgctatgggtccctgaggcctggctggccagcaagagggcagggttggctagaggaggaagacggcgaggacgtgcgaggggtgctgaagaggcgcgtggagacgaggcagccaactgaggaggcgatccccgagcaggaggtggagcagctggacttccgagacctcctggggaagaaggtgagtacaaagaccctatcggaagacgacctgaaggagatcccagccgagcagatggatttccgtgccaacctgcagcggcaagtgaagccaaagactgtgtctgaggaagagaggaaggtgcacagcccccagcaggtcgattttcgctctgtcctggccaagaaggggacttccaagacccccgtgcctgagaaggtgccaccgccaaaacctgccaccccggattttcgctcagtgctgggtggcaagaagaaattaccagcagagaatggcagcagcagtgccgagaccctgaatgccaaggcagtggagagttccaagcccctgagcaatgcacagccttcagggcccttgaaacccgtgggcaacgccaagcctgctgagaccctgaagccaatgggcaacgccaagcctgccgagaccctgaagcccatgggcaatgccaagcctgatgagaacctgaaatccgctagcaaagaagaactcaagaaagacgttaagaatgatgtgaactgcaagagaggccatgcagggaccacagataatgaaaagagatcagagagccaggggacagccccagccttcaagcagaagctgcaagatgttcatgtggcagagggcaagaagctgctgctccagtgccaggtgtcttctgaccccccagccaccatcatctggacgctgaatggaaagaccctcaagaccaccaagttcatcatcctctcccaggaaggctcactctgctccgtctccatcgagaaggcactgcctgaggacagaggcttatacaagtgtgtagccaagaatgacgctggccaggcggagtgctcctgccaagtcaccgtggatgatgctccagccagtgagaacaccaaggccccagagatgaaatcccggaggcccaagagctctcttcctcccgtgctaggaactgagagtgatgcgactgtgaaaaagaaacctgcccccaagacacctccgaaggcagcaatgccccctcagatcatccagttccctgaggaccagaaggtacgcgcaggagagtcagtggagctgtttggcaaagtgacaggcactcagcccatcacctgtacctggatgaagttccgaaagcagatccaggaaagcgagcacatgaaggtggagaacagcgagaatggcagcaagctcaccatcctggccgcgcgccaggagcactgcggctgctacacactgctggtggagaacaagctgggcagcaggcaggcccaggtcaacctcactgtcgtggataagccagaccccccagctggcacaccttgtgcctctgacattcggagctcctcactgaccctgtcctggtatggctcctcatatgatgggggcagtgctgtacagtcctacagcatcgagatctgggactcagccaacaagacgtggaaggaactagccacatgccgcagcacctctttcaacgtccaggacctgctgcctgaccacgaatataagttccgtgtacgtgcaatcaacgtgtatggaaccagtgagccaagccaggagtctgaactcacaacggtaggagagaaacctgaagagccgaaggatgaagtggaggtgtcagacgatgatgagaaggagcccgaggttgattaccggacagtgacaatcaatactgaacaaaaagtatctgacttctacgacattgaggagagattaggatctgggaaatttggacaggtctttcgacttgtagaaaagaaaactcgaaaagtctgggcagggaagttcttcaaggcatattcagcaaaagagaaagagaatatccggcaggagattagcatcatgaactgcctccaccaccctaagctggtccagtgtgtggatgcctttgaagaaaaggccaacatcgtcatggtcctggagatcgtgtcaggaggggagctgtttgagcgcatcattgacgaggactttgagctgacggagcgtgagtgcatcaagtacatgcggcagatctcggagggagtggagtacatccacaagcagggcatcgtgcacctggacctcaagccggagaacatcatgtgtgtcaacaagacgggcaccaggatcaagctcatcgactttggtctggccaggaggctggagaacgcggggtctctgaaggtcctctttggcaccccagaatttgtggctcctgaagtgatcaactatgagcccatcggctacgccacagacatgtggagcatcggggtcatctgctacatcctagtcagtggcctttcccccttcatgggagacaacgataacgaaaccttggccaacgttacctcagccacctgggacttcgacgacgaggcattcgatgagatctccgacgatgccaaggatttcatcagcaatctgctgaagaaagatatgaaaaaccgcctggactgcacgcagtgccttcagcatccatggctaatgaaagataccaagaacatggaggccaagaaactctccaaggaccggatgaagaagtacatggcaagaaggaaatggcagaaaacgggcaatgctgtgagagccattggaagactgtcctctatggcaatgatctcagggctcagtggcaggaaatcctcaacagggtcaccaaccagcccgctcaatgcagaaaaactagaatctgaagatgtgtcccaagctttccttgaggctgttgctgaggaaaagcctcatgtaaaaccctatttctctaagaccattcgcgatttagaagttgtggagggaagtgctgctagatttgactgcaagattgaaggatacccagaccccgaggttgtctggttcaaagatgaccagtcaatcagggagtcccgccacttccagatagactacgatgaggacgggaactgctctttaattattagtgatgtttgcggggatgacgatgccaagtacacctgcaaggctgtcaacagtcttggagaagccacctgcacagcagagctcattgtggaaacgatggaggaaggtgaaggggaaggggaagaggaagaagagtgaaacaaagccagagaaaagcagtttctaagtcatattaaaaggactatttctctaaaactcaaaaaaaaa

SEQ ID NO: 132 - DNA, 6447 bp, Homo sapiens
aggtctccgcttggagccgccgcacccgggacggtgcgtatcgctggaagtccggccttccgagagctagctgtccgccgcggcccccgcacgccgggcagccgtccctcgcgcctcgggcgcgccaccatggggccccggctcagcgtctggctgctgctgctgcccgccgcccttctgctccacgaggagcacagccgggccgctgcgaagggtggctgtgctggctctggctgtggcaaatgtgactgccatggagtgaagggacaaaagggtgaaagaggcctcccggggttacaaggtgtcattgggtttcctggaatgcaaggacctgaggggccacagggaccaccaggacaaaagggtgatactggagaaccaggactacctggaacaaaagggacaagaggacctccgggagcatctggctaccctggaaacccaggacttcccggaattcctggccaagacggcccgccaggccccccaggtattccaggatgcaatggcacaaagggggagagagggccgctcgggcctcctggcttgcctggtttcgcaggaaatcccggaccaccaggcttaccagggatgaagggtgatccaggtgagatacttggccatgtgcccgggatgctgttgaaaggtgaaagaggatttcccggaatcccagggactccaggcccaccaggactgccagggcttcaaggtcctgttgggcctccaggatttaccggaccaccaggtcccccaggccctcccggccctccaggtgaaaagggacaaatgggcttaagttttcaaggaccaaaaggtgacaagggtgaccaaggggtcagtgggcctccaggagtaccaggacaagctcaagttcaagaaaaaggagacttcgccaccaagggagaaaagggccaaaaaggtgaacctggatttcaggggatgccaggggtcggagagaaaggtgaacccggaaaaccaggacccagaggcaaacccggaaaagatggtgacaaaggggaaaaagggagtcccggttttcctggtgaacccgggtacccaggactcataggccgccagggcccgcagggagaaaagggtgaagcaggtcctcctggcccacctggaattgttataggcacaggacctttgggagaaaaaggagagaggggctaccctggaactccggggccaagaggagagccaggcccaaaaggtttcccaggactaccaggccaacccggacctccaggcctccctgtacctgggcaggctggtgcccctggcttccctggtgaaagaggagaaaaaggtgaccgaggatttcctggtacatctctgccaggaccaagtggaagagatgggctcccgggtcctcctggttcccccgggccccctgggcagcctggctacacaaatggaattgtggaatgtcagcccggacctccaggtgaccagggtcctcctggaattccagggcagccaggatttataggcgaaattggagagaaaggtcaaaaaggagagagttgcctcatctgtgatatagacggatatcgggggcctcccgggccacagggacccccgggagaaataggtttcccagggcagccaggggccaagggcgacagaggtttgcctggcagagatggtgttgcaggagtgccaggccctcaaggtacaccagggctgataggccagccaggagccaagggggagcctggtgagttttatttcgacttgcggctcaaaggtgacaaaggagacccaggctttccaggacagcccggcatgccagggagagcgggttctcctggaagagatggccatccgggtcttcctggccccaagggctcgccgggttctgtaggattgaaaggagagcgtggcccccctggaggagttggattcccaggcagtcgtggtgacaccggcccccctgggcctccaggatatggtcctgctggtcccattggtgacaaaggacaagcaggctttcctggaggccctggatccccaggcctgccaggtccaaagggtgaaccaggaaaaattgttcctttaccaggcccccctggagcagaaggactgccggggtccccaggcttcccaggtccccaaggagaccgaggctttcccggaaccccaggaaggccaggcctgccaggagagaagggcgctgtgggccagccaggcattggatttccagggccccccggccccaaaggtgttgacggcttacctggagacatggggccaccggggactccaggtcgcccgggatttaatggcttacctgggaacccaggtgtgcagggccagaagggagagcctggagttggtctaccgggactcaaaggtttgccaggtcttcccggcattcctggcacacccggggagaaggggagcattggggtaccaggcgttcctggagaacatggagcgatcggaccccctgggcttcaggggatcagaggtgaaccgggacctcctggattgccaggctccgtggggtctccaggagttccaggaataggcccccctggagctaggggtccccctggaggacagggaccaccggggttgtcaggccctcctggaataaaaggagagaagggtttccccggattccctggactggacatgccgggccctaaaggagataaaggggctcaaggactccctggcataacgggacagtcggggctccctggccttcctggacagcagggggctcctgggattcctgggtttccaggttccaagggagaaatgggcgtcatggggacccccgggcagccgggctcaccaggaccagtgggtgctcctggattaccgggtgaaaaaggggaccatggctttccgggctcctcaggacccaggggagaccctggcttgaaaggtgataagggggatgtcggtctccctggcaagcctggctccatggataaggtggacatgggcagcatgaagggccagaaaggagaccaaggagagaaaggacaaattggaccaattggtgagaagggatcccgaggagaccctgggaccccaggagtgcctggaaaggacgggcaggcaggacagcctgggcagccaggacctaaaggtgatccaggtataagtggaaccccaggtgctccaggacttccgggaccaaaaggatctgttggtggaatgggcttgccaggaacacctggagagaaaggtgtgcctggcatccctggcccacaaggttcacctggcttacctggagacaaaggtgcaaaaggagagaaagggcaggcaggcccacctggcataggcatcccaggactgcgtggtgaaaagggagatcaagggatagcgggtttcccaggaagccctggagagaagggagaaaaaggaagcattgggatcccaggaatgccagggtccccaggccttaaagggtctcccgggagtgttggctatccaggaagtcctgggctacctggagaaaaaggtgacaaaggcctcccaggattggatggcatccctggtgtcaaaggagaagcaggtcttcctgggactcctggccccacaggcccagctggccagaaaggggagccaggcagtgatggaatcccggggtcagcaggagagaagggtgaaccaggtctaccaggaagaggattcccagggtttccaggggccaaaggagacaaaggttcaaagggtgaggtgggtttcccaggattagccgggagcccaggaattcctggatccaaaggagagcaaggattcatgggtcctccggggccccagggacagccggggttaccgggatccccaggccatgccacggaggggcccaaaggagaccgcggacctcagggccagcctggcctgccaggacttccgggacccatggggcctccagggcttcctgggattgatggagttaaaggtgacaaaggaaatccaggctggccaggagcacccggtgtcccagggcccaagggagaccctggattccagggcatgcctggtattggtggctctccaggaatcacaggctctaagggtgatatggggcctccaggagttccaggatttcaaggtccaaaaggtcttcctggcctccagggaattaaaggtgatcaaggcgatcaaggcgtcccgggagctaaaggtctcccgggtcctcctggccccccaggtccttacgacatcatcaaaggggagcccgggctccctggtcctgagggccccccagggctgaaagggcttcagggactgccaggcccgaaaggccagcaaggtgttacaggattggtgggtatacctggacctccaggtattcctgggtttgacggtgcccctggccagaaaggagagatgggacctgccgggcctactggtccaagaggatttccaggtccaccaggccccgatgggttgccaggatccatggggcccccaggcaccccatctgttgatcacggcttccttgtgaccaggcatagtcaaacaatagatgacccacagtgtccttctgggaccaaaattctttaccacgggtactctttgctctacgtgcaaggcaatgaacgggcccatggacaggacttgggcacggccggcagctgcctgcgcaagttcagcacaatgcccttcctgttctgcaatattaacaacgtgtgcaactttgcatcacgaaatgactactcgtactggctgtccacccctgagcccatgcccatgtcaatggcacccatcacgggggaaaacataagaccatttattagtaggtgtgctgtgtgtgaggcgcctgccatggtgatggccgtgcacagccagaccattcagatcccaccgtgccccagcgggtggtcctcgctgtggatcggctactcttttgtgatgcacaccagcgctggtgcagaaggctctggccaagccctggcgtcccccggctcctgcctggaggagtttagaagtgcgccattcatcgagtgtcacggccgtgggacctgcaattactacgcaaacgcttacagcttttggctcgccaccatagagaggagcgagatgttcaagaagcctacgccgtccaccttgaaggcaggggagctgcgcacgcacgtcagccgctgccaagtctgtatgagaagaacataagaagcctgactcagctaatgtcacaacatggtgctacttcttcttctttttgttaacagcaacgaaccctagaaatatatcctgtgtacctcactgtccaatatgaaaaccgtaaagtgccttataggaatttgcgtaactaacacaccctgcttcattgacctctacttgctgaaggagaaaaagacagcgataagcttcaatagtggcataccaaatggcacttttgatgaaataaaatatcaatattttctgcaatccaatgcactgatgtgtgaagtgagaactccatcagaaaaccaaagggtgctaggaggtgtgggtgccttccatactgtttgcccattttcattcttgtattataattaattttctacccccagagataaatgtttgtttatatcactgtctagctgtttcaaaatttaggtcccttggtctgtacaaataatagcaatgtaaaaatggttttttgaacctccaaatggaattacagactcagtagccatatcttccaaccccccagtataaatttctgtctttctgctatgtgtggtactttgcagctgcttttgcagaaatcacaattttcctgtggaataaagatggtccaaaaatagtcaaaaattaaatatatatatatattagtaatttatatagatgtcagcaattaggcagatcaaggtttagtttaacttccactgttaaaataaagcttacatagttttcttcctttgaaagactgtgctgtcctttaacataggtttttaaagactaggatattgaatgtgaaacatccgttttcattgttcacttctaaaccaaaaattatgtgttgccaaaaccaaacccaggttcatgaatatggtgtctattatagtgaaacatgtactttgagcttattgtttttattctgtattaaatattttcagggttttaaacactaatcacaaactgaatgacttgacttcaaaagcaacaaccttaaaggccgtcatttcattagtattcctcattctgcatcctggcttgaaaaacagctctgttgaatcacagtatcagtattttcacacgtaagcacattcgggccatttccgtggtttctcatgagctgtgttcacagacctcagcagggcatcgcatggaccgcaggagggcagattcggaccactaggcctgaaatgacatttcactaaaagtctccaaaacatttctaagactactaaggccttttatgtaatttctttaaatgtgtatttcttaagaattcaaatttgtaataaaactatttgtataaaaattaagctt

SEQ ID NO: 133 - DNA, 3309 bp, Homo sapiens
ctgcagggggggggggggggggggggggggggggggggcgcagcacggctcagaccgaggcgcacaggctcgcagctccgggcgcctagcgcccggtccccgccgcgacgcgccaccgtccctgccggcgcctccgcgccttcgaaatgagggtcctgggtgggcgctgcggggcgccgctggcgtgtctcctcctagtgcttcccgtctcagaggcaaaccttctgtcaaagcaacaggcttcacaagtcctggttaggaagcgtcgtgcaaattctttacttgaagaaaccaaacagggtaatcttgaaagagaatgcatcgaagaactgtgcaataaagaagaagccagggaggtctttgaaaatgacccggaaacggattatttttatccaaaatacttagtttgtcttcgctcttttcaaactgggttattcactgctgcacgtcagtcaactaatgcttatcctgacctaagaagctgtgtcaatgccattccagaccagtgtagtcctctgccatgcaatgaagatggatatatgagctgcaaagatggaaaagcttcttttacttgcacttgtaaaccaggttggcaaggagaaaagtgtgaatttgacataaatgaatgcaaagatccctcaaatataaatggaggttgcagtcaaatttgtgataatacacctggaagttaccactgttcctgtaaaaatggttttgttatgctttcaaataagaaagattgtaaagatgtggatgaatgctctttgaagccaagcatttgtggcacagctgtgtgcaagaacatcccaggagattttgaatgtgaatgccccgaaggctacagatataatctcaaatcaaagtcttgtgaagatatagatgaatgctctgagaacatgtgtgctcagctttgtgtcaattaccctggaggttacacttgctattgtgatgggaagaaaggattcaaacttgcccaagatcagaagagttgtgaggttgtttcagtgtgccttcccttgaaccttgacacaaagtatgaattactttacttggcggagcagtttgcaggggttgttttatatttaaaatttcgtttgccagaaatcagcagattttcagcagaatttgatttccggacatatgattcagaaggcgtgatactgtacgcagaatctatcgatcactcagcgtggctcctgattgcacttcgtggtggaaagattgaagttcagcttaagaatgaacatacatccaaaatcacaactggaggtgatgttattaataatggtctatggaatatggtgtctgtggaagaattagaacatagtattagcattaaaatagctaaagaagctgtgatggatataaataaacctggacccctttttaagccggaaaatggattgctggaaaccaaagtatactttgcaggattccctcggaaagtggaaagtgaactcattaaaccgattaaccctcgtctagatggatgtatacgaagctggaatttgatgaagcaaggagcttctggaataaaggaaattattcaagaaaaacaaaataagcattgcctggttactgtggagaagggctcctactatcctggttctggaattgctcaatttcacatagattataataatgtatccagtgctgagggttggcatgtaaatgtgaccttgaatattcgtccatccacgggcactggtgttatgcttgccttggtttctggtaacaacacagtgccctttgctgtgtccttggtggactccacctctgaaaaatcacaggatattctgttatctgttgaaaatactgtaatatatcggatacaggccctaagtctatgttccgatcaacaatctcatctggaatttagagtcaacagaaacaatctggagttgtcgacaccacttaaaatagaaaccatctcccatgaagaccttcaaagacaacttgccgtcttggacaaagcaatgaaagcaaaagtggccacatacctgggtggccttccagatgttccattcagtgccacaccagtgaatgccttttataatggctgcatggaagtgaatattaatggtgtacagttggatctggatgaagccatttctaaacataatgatattagagctcactcatgtccatcagtttggaaaaagacaaagaattcttaaggcatcttttctctgcttataataccttttccttgtgtgtaattatacttatgtttcaataacagctgaagggttttatttacaatgtgcagtctttgattattttgtggtcctttcctgggatttttaaaaggtcctttgtcaaggaaaaaaattctgttgtgatataaatcacagtaaagaaattcttacttctcttgctatctaagaatagtgaaaaataacaattttaaatttgaatttttttcctacaaatgacagtttcaatttttgtttgtaaaactaaattttaattttatcatcatgaactagtgtctaaatacctatgtttttttcagaaagcaaggaagtaaactcaaacaaaagtgcgtgtaattaaatactattaatcataggcagatactattttgtttatgtttttgtttttttcctgatgaaggcagaagagatggtggtctattaaatatgaattgaatggagggtcctaatgccttatttcaaaacaattcctcagggggaccagctttggcttcatctttctcttgtgtggcttcacatttaaaccagtatctttattgaattagaaaacaagtgggacatattttcctgagagcagcacaggaatcttcttcttggcagctgcagtctgtcaggatgagatatcagattaggttggataggtggggaaatctgaagtgggtacattttttaaattttgctgtgtgggtcacacaaggtctacattacaaaagacagaattcagggatggaaaggagaatgaacaaatgtgggagttcatagttttccttgaatccaacttttaattaccagagtaagttgccaaaatgtgattgttgaagtacaaaaggaactatgaaaaccagaacaaattttaacaaaaggacaaccacagagggatatagtgaatatcgtatcattgtaatcaaagaagtaaggaggtaagattgccacgtgcctgctggtactgtgatgcatttcaagtggcagttttatcacgtttgaatctaccattcatagccagatgtgtatcagatgtttcactgacagtttttaacaataaattcttttcactgtattttatatcacttataataaatcggtgtataatttt

SEQ ID NO: 134 - DNA, 2742 bp, Homo sapiens; identical to SEQ ID NO: 118

SEQ ID NO: 135 - DNA, 757 bp, Homo sapiens
ggaaccgagaggctgagactaacccagaaacatccaattctcaaactgaagctcgcactctcgcctccagcatgaaagtctctgccgcccttctgtgcctgctgctcatagcagccaccttcattccccaagggctcgctcagccagatgcaatcaatgccccagtcacctgctgttataacttcaccaataggaagatctcagtgcagaggctcgcgagctatagaagaatcaccagcagcaagtgtcccaaagaagctgtgatcttcaagaccattgtggccaaggagatctgtgctgaccccaagcagaagtgggttcaggattccatggaccacctggacaagcaaacccaaactccgaagacttgaacactcactccacaacccaagaatctgcagctaacttattttcccctagctttccccagacaccctgttttattttattataatgaattttgtttgttgatgtgaaacattatgccttaagtaatgttaattcttatttaagttattgatgttttaagtttatctttcatggtactagtgttttttagatacagagacttggggaaattgcttttcctcttgaaccacagttctacccctgggatgttttgagggtctttgcaagaatcattaatacaaagaattttttttaacattccaatgcattgctaaaatattattgtggaaatgaatattttgtaactattacaccaaataaatatatttttgtacaaaaaaaaaaaaaa

SEQ ID NO: 136 - DNA, 2230 bp, Homo sapiens
gcagcccactcttcccgagaggccccgacatctcccggataatctggagctttcaaaatgtttgccaaagcaaccaggaattttcttagagaagttgatgctgatggtgacctgattgcagtatcaaatctgaatgactctgataagttacagcttctaagtctggtgacaaaaaagaagagattctggtgctggcagagacccaagtaccagtttttatccctcacccttggcgatgtactcatagaagaccaatttccgagtccagtggtcgtggagtcggactttgtgaaatacgagggcaagtttgcaaaccacgtgagtggaaccctggagactgcactggggaaggtcaagctgaacctggggggcagcagccgcgtagagagccagtcttcatttggaaccctgaggaagcaggaggtggatttgcagcagctcatcagagactctgccgagagaacaataaatctgagaaaccctgtgctccagcaggtgctggaaggaaggaatgaggtcctgtgcgttttgacacagaagatcacgacgatgcagaagtgtgtgatctctgagcacatgcaggtcgaggagaagtgtggtggcatcgtgggcatccagaccaagacggtgcaggtgtcagcgacggaggatgggaatgtcaccaaggactccaacgtggtgctggagatcccagctgccaccaccattgcctacggtgtcattgagttatacgtgaaactggacggccagttcgagttctgccttctccgagggaagcaaggtggcttcgagaacaagaagagaattgactctgtctacctggaccccctggtctttcgagagtttgcattcatagacatgccagatgctgcgcatgggatatcttcccaggatggaccattaagtgttttaaagcaagcgaccctgctcctggagaggaatttccatccatttgcggagctgcctgagccacaacagacagctttgagtgacatcttccaggcggtcctatttgatgatgaactactcatggtcctggaaccagtgtgcgatgacctggtcagcggcctctcgcccacagtggcggtgctgggggagctgaagccccggcagcagcaggaccttgtggccttcctgcagctggtggggtgcagcttacagggtgggtgtccgggccccgaggatgcaggcagcaagcagctgtttatgacagcctacttcttggtcagtgccctcgcagaaatgccagatagcgcggcagctctgctgggcacttgctgcaaactccagatcattcccacactgtgccacttgcttcgtgctctgtctgatgatggagtatctgatcttgaagacccaaccttgactcccctgaaagatacagaaaggtttgggattgtgcagcgcttgtttgcctcagctgacattagtctggagagactgaagtcatctgtgaaagctgtcattctgaaggactctaaagtcttcccactgcttctttgtataaccctgaatggactctgtgctttaggcagagaacattcatgatgtcatatgtgaactagaagtacgtgttactggccaaggctatttttcagaactgttaaaggtcatatgcacgttaaaagttgaccaatgaaatgaatttacagaacagtttaagaagtggtgacattttgcatgatgaatgacctgacttttagccaccaggtactctttaaacagttttccttatcagaggccctcctgtgctggtgacccagcatctgagttaggttccagcatgtaaagagctgggagggcggagaattcttagcatacattcagacgttttttctgcacaataataagtccatctgtcacttgcattccactttttgttacatagaaagagtctgaccctttaatccaaaaggtctttttacattgtgaatgctgtgggaaggcaatttctctgcacacaagaggctacgttttggaagtgatgtatgttatttgatgactgaaaatgaactgtaaatgctcctagagtatattcctctgctgaacaaaattaaacttcaaaaaaatctaacagtaacacacccctgcttgggaccctagctatatgcattttatgtgaccttgccatgcttcagtgaacatactaattctatgtctagcacatgttgatttcctatgtattctgggtattctattaaaggaaactttgaactattaaaaaaaaaaa

SEQ ID NO: 137 - DNA, 1256 bp, Homo sapiens; identical to SEQ ID NO: 125

SEQ ID NO: 138 - DNA, 3949 bp, Homo sapiens
aggagccgacgggcgctcgcaggctcagcgcgcgctgcccgcggcaggacccggccgcctccgccgccgccgccgcccctaagcctcccgaagccatggccgggctcggccaccccgccgccttcggccgggccacccacgccgtggtgcgggcgctacccgagtcgctcggccagcacgcgctgagaagcgccaagggcgaggaggtggacgtcgcccgcgcggaacggcagcaccagctctacgtgggcgtgctgggcagcaagctggggctgcaggtggtggagctgccggccgacgagagccttccggactgcgtcttcgtggaggacgtggccgtggtgtgcgaggagacggccctcatcacccgacccggggcgccgagccggaggaaggaggttgacatgatgaaagaagcattagaaaaacttcagctcaatatagtagagatgaaagatgaaaatgcaactttagatggcggagatgttttattcacaggcagagaattttttgtgggcctttccaaaaggacaaatcaacgaggtgctgaaatcttggctgatacttttaaggactatgcagtctccacagtgccagtggcagatgggttgcatttgaagagtttctgcagcatggctgggcctaacctgatcgcaattgggtctagtgaatctgcacagaaggcccttaagatcatgcaacagatgagtgaccaccgctacgacaaactcactgtgcctgatgacatagcagcaaactgtatatatctaaatatccccaacaaagggcacgtcttgctgcaccgaaccccggaagagtatccagaaagtgcaaaggtttatgagaaactgaaggaccatatgctgatccccgtgagcatgtctgaactggaaaaggtggatgggctgctcacctgctgctcagttttaattaacaagaaagtagactcctgagctgcagagtcccccccggtagccggcaagaccgcacaggcaaggccgatgactctgtgcccactcctgttgttttccttgacaatctactgtgccactgtgctactaactcttgtttacaaaatttgattctaagttgaattgcttcattcaacacccccaccctccctcccctcgaggtggtacctaagctgtggatttgctaaatgaattaagcaacctagaagatacagagctaatgaattatcaaaatgtgattaatcccagtaaggaaacactcatttagtgtctgtatttttggtgtgaaaattatttagttgccagtatattctgaagaatgtcttcttgatcagtcagataagcttgctttttttttttttttttttcatgaatcatgtttggttcctgtgaaagtccctggtccagggatcctcctcctttctcttttacttctgaattctgaaattcagttagttacttttgcctttcgctcttctatcacagccaccttgaccttgggtaaaacccaaggtctttccttctggctaccttcctgcaggtccaccctgtctgccattggtctcctctgcctctgactacatctgccaccaacaaccctcccctcacccctgccaggggcagacaggcttctcagcagaactgtgactgaaatcagagctgctgtctggggcagtgttaactacacagaggcacatcctgacagggtttgccccagagatctaaattccagaaggagggcaccacacctaggaaggtaaatccagtatcagaaggttgctaaaagattaaagatcaagaagcttggaaacatcccatgggtacaatgtcttagaaagtctttaagtcacataccatgaatttttgcttcattactgaccatatatgaccttggaggaactcttttttttttttccttctactcatttctgtttccacctaccctgactcaccgtatttccagtcttctacccctgcagttatcctagtccagcaaagtcatttctttcaaaagagacatcatgtctgaaaataattactggtagtctaatatgagccagagtaaacagctcctcatggtcaatgaacatgttcaggaagcgatcaccttgatgcttgaacccaaccccagacagtggacaattctactttgaaatatccgtgaatatttactgtgggatccaatttaaacttctttcttctctagcctttaaattacacaactttgaactgacacggatctcttacaaagaacaatgcggcactgaaggaagagatgattcctttactcaaacctgcaggaatcagcctattaacaggcaggggaaacggtactttccaatgaatggtaactgatccaggcacattatcacacttcctagtcatctccacctttcctgtattgcctgtggcttgttgtttaagattaagaatcaaagagattaagaagtatcacttcaagtcttgctctgctcacttctatgtttgcagtcaaattattccttatgttggtgacctaaagagaattactttcattcatttcatttcccccgtagcagatggaagtgagaaacctctgagaaaatgaaaacatccttaaccactatctttcccttttatttgattattttatgtcagaaatttgcaaaagtttttttctcctccttctcttccttgttgcttaactttttaattcatgccatatgcagatatccaattatgtgcatcctgtgaataaaccacgtcttggtcactgtcatattttgaaccatctcatcagagatgaataatatctttttaccagagagagaacgaatgttagccacatgcccaagttaacaaagaaaaaatgttctcaaggttgtccttttgggttaaatctggcccttccttggcaaaagcaaaaattctccctgtgagagctcaacatctcaaatacaaccacaggaaaaatggcccaatctgccagtttaggcttaccagcatataatttttaatatctttacttctatcatcccaaatcaaagaactcttctctattatgtttaatcaattgcaagcaaatagatttttctttgtaacaatttgttctgcagaaggctgtttttcacttttcctttcttttgcttctttctgtctttccttctcttttgtctggagaaatcacttagactctgtgtgcctcttctacattgcattctgctctgctatgttacctgctaggctggcttctttggactccctatatgattgatgatgtgaaaacctaaattacttgcagcatagtattacttctttgatgttctcattagcataatgttatttttgaaaaggaaagatactatcacataagttttcctcatctgttgtgatatacaccaatggataaactaacggaaactgctttttgacattaaaagacaggagaaattatatttaactaagtaaaagttaagtcagaattacttgggtgatgtgattcaatttagttaaaggatgatatagagaaaatacattatttagcattatttcttcagctataatgaattgctatagaaatcaggcagatctttctaatgtgtattgattggtcttttcagctactctgaacagattactaaggccatctcctcatctctaagggagaaaaatagtctgtagatgaataatgtaaggtaaagagttgcatgtcagtctttgtaattatttacactttaactttctccagaactcagacatgatttcaacatggtgttagatttgtgcattttattttcctgaccacctcattccagccaatgtatggttatccactctgtgtgccaaaaccaatcatgcctttcacggccctttagttcagagaagttctgcactgatttttagtctcttgatgtctcaatcttacatgtataccaatcacaatggaataaagtgttgagttgtactgtgaaaaaaaaaaaaaaaaaaaaaaaaaaaaa

SEQ ID NO: 139 - DNA, 1885 bp, Homo sapiens
cgggcactcaccgtgtgtagttggcatctccgcgcgtccggacacccgatcccagcatccctgcctgcaggactgttcgtgttcagctcgcgtcctgcagctgtccgaggtgctccagttggaggctgaggttcccgggctctgtcgctgagtgggcggcggcaccggcggagatgcctgggaagaaggcgcgcaagaacgctcaaccgagccccgcgcgggctccagcagagctggaagtcgagtgtgctactcaactcaggagatttggagacaaactgaacttccggcagaaacttctgaatctgatatccaaactcttctgctcaggaacctgactgcatcaaaaacttgcatgaggggactccttcaaaagagttttctcaggaggtgcacgtttcatcaatttgaagaaagactgcattgtaattgagaggaatgtgaaggtgcattcatgggtgcccttggaaacggaagatggaatacatcaaagtgaatttctgttcaagttttcccagattatcattctttgggatgagagaacattataaaaccactttgtttattttaaagcaagaatggaagacccttgaaaataaagaagtaattattgacacatttcttttttacttagagaatcgttctagtgtttttgccgaagattaccgctggcctactgtgaaggtagatgacctgtgattagactgggcggctggggagaaacagttcagtgcattgttgttgttgctgtttttggtgttttgcttttcagtgccaactcagcacattgtatatgattcggtttatacatattaccttgttataatgaaaaaactcattctgagaacactgaaatgttatactcagtgttgatttcttcggtcactacacaacgtaaaatcatttgtttcttttgactcaaattgtattgcttctgttcagatgatctttcattcaatgtgttcctgttgggcgttactagaaactatggaaaactggaaaataactttgaaaaaattggataaagtataggagggttacttggggccagtaaatcagtagactgaacattcaatataataaaagaacatggggattttgtataaccagggataataaaaagaaaaagaagttaatttttaattgatgtttttgaaacttagtagaacaaatattcagaagtaacttgataagatatgaatgtttctaaagagtttctaaaggttcgaaatgctccttgtcacattagtgtgcatcctacaaaaagtgatctcttaatgtaaattaagaatattttcataattggaatatacttttcttaaaaaaaaggaacagttagttctcatctagaatgaaagttccatatatgcattggtgaatatatatgtatacacatacttacatacttatatgggtatctgtatagataatttgtattagagtattatatagcttcttagtagggtctcaagtaagttcattttttttatctgggctatatacagtcctcaaataaataatgtcttgattttatttcagcaggaataattttatttattttgcctatttataattaaagtatttttctttagtttgaaatgtgtattaaagttacatttttgagttacaagagtcttataactacttgaatttttagttaaaatgtcttaatgtaggttgtagtcactttagatggaaaattacctcacatctgttttcttcagtattacttaagattgtttatttagtggtagagagattttttttttcagcctagaggcagctattttaccatctggtatttatggtctaatttgtatttaaacatatgcacacatataaaagttgatactgtggcagtaaactattaaaagttttcactgtt

SEQ ID NO: 140 - DNA, 2225 bp, Homo sapiens
ggttctttgcactgaccaatgctgagagcagaccctcggagcagccgggttggaagtgtctctccacagtcaccagacagatccaggataggatgggcagcccagtgcaccgagtgtcattgggggatacctggagcaggcaaatgcaccccgacatagagagcgagaggtatatgcagtcctttgacgtggaacggctcaccaacatccttgatggaggtgcccagaacactgcactccgcaggaaagttgagagcatcatccacagttacccggagtttagctgtaaggacaattatttcatgacccagaatgagcgttataaggctgccatgcggagggcattccacatccggttgatagctcggcgcctgggttggttagaagatggtcgtgaattaggctacgcttacagagccctttctggagacgtggccttaaatatacacagagtcttcgtgagagccctcaggagcctgggctcagaggagcagattgccaaatgggacccactctgcaaaaacatccagatcatcgcaacgtatgcacagacagagttgggacatgggacatatcttcagggcctggagactgaagccacctatgacgcagccacccaggagtttgtgatacacagccccacgctgactgccaccaaatggtggcctggagacttgggacggtcagccacccatgccctggtccaggcccagctgatctgctcaggagccaggcggggcatgcacgcttttattgtgccaatccggagtcttcaggaccacaccccactgccaggaatcatcattggggacatcggacccaagatggactttgatcaaacagacaatggcttcctgcagctgaaccatgtgcgggtccccagggagaacatgctgagtcgctttgcacaggtcttgccagatggcacctacgtcaaactcggtacagcacagagcaactaccttcccatggtggtggtgcgggtggagctgctgtcaggggagatcctccctatactgcagaaggcctgtgtcatcgccatgcgctactcggtcatccgccgccaatcccggctccggcccagtgacccagaggcaaaggtcctggactaccagacacaacagcagaaactctttcctcagctggccatcagttatgccttccatttcctggcagtcagcctcttggagttcttccagcactcctacactgccattctgaaccaagacttcagcttcctgcctgagctccacgcgctgagcacgggcatgaaggccatgatgtcagaattctgcacccagggagctgagatgtgccgcagggcctgtggcggacatggctactcaaagctgagtggcctgccatcactggtcaccaaattgtcggcctcctgcacctacgagggtgagaacacagtgctctacctgcaggtggccaggttcctggtgaagagctacctgcagactcagatgtcccctggctccacgccacagagatctctctctccatctgtcgcatatctcaccgcacctgacctggccaggtgtccagcccagagggcagccgacttcctctgcccggagctctacaccacggcctgggcacatgtggcagtaaggctcataaaggactcagtgcagcatttacagaccctgacgcaatccggagctgaccagcacgaggcttggaaccagaccactgtcatacacctccaggctgctaaggtgcactgctactatgtcactgtgaagggttttacagaagctctggagaaactagaaaatgaaccagcgattcagcaggtgctcaagcgcctctgtgacctccatgccatacatggaatcttgactaactcgggtgactttctccatgacgccttcctgtctggtgcccaagtggacatggcaagaacagcctacctggacctgctccgcctgatccggaaggatgccatcctgttaactgatgcttttgacttcaccgatcagtgtttaaattcagcccttggctgttatgatggaaacgtctacgaacgcctgttccagtgggctcagaagtcaccaaccaatactcaggagaaccctgcctatgaggaatatataagaccacttttacaaagttggagatccaagctatgaaataaccaacagtattcaagaagcaaccagcaccatcatgtgataatggtactatggcatatatgcaacattaaaattttaaattag

SEQ ID NO: 141 - DNA, 2225 bp, Homo sapiens
cggcggcggcggtggcggcggcgactgctgcggtgaaggaggaggaggagccgagcgggcgctggcaccgaggcctgaccatggacgaggaatacgatgtgatcgtgctggggaccggtctcaccgaatgcatcctgtcgggcatcatgtctgtgaacgggaagaaggtgctgcacatggaccggaacccctactacgggggcgagagctcctccatcacacccctggaggagctgtataagcgttttcagttgctggaggggccccctgagtcgatgggccgaggccgagactggaatgttgacctgattcccaaattcctcatggctaacgggcagctggtaaagatgctactgtatacagaggtgactcgctacctggacttcaaggtggtggagggcagctttgtctacaaggggggcaagatctacaaagtgccgtccactgagactgaggccttggcttccaatctgatgggcatgtttgagaaacggcgcttccgcaagttcctggtgtttgtggcaaacttcgatgagaatgaccccaagacctttgagggcgttgacccccagactaccagcatgcgtgacgtctaccggaagtttgatctgggccaggatgtcatcgatttcactggccatgccctggcgctctaccgcactgatgactacctggaccagccctgccttgagaccgtcaaccgcatcaagttgtacagtgagtccctggcccggtatggcaagagcccatatttatacccgctctacggcttgggcgagctgccccagggttttgcaagattgagtgccatctatggggggacatatatgctgaacaaacctgtggatgacatcatcatggagaacggcaaggtggtgggcgtgaagtctgagggagaggtggcccgctgcaagcagctgatctgtgaccccagctacatcccggaccgtgtgcggaaggctggccaggttatccgcatcatctgtatccttagccaccccatcaagaacaccaacgacgccaactcctgccaaataatcatcccccagaaccaggtcaacaggaagtcagacatctacgtgtgcatgatctcctatgcacacaacgtggcggcccagggcaagtacatagctattgccagcactactgtggagaccacggaccctgaaaaggaggtggagccggctctggagctgttggagcccattgaccagaagtttgtggctatcagtgacttgtatgagcccattgatgatggttgtgagagccaggtgttctgttcctgctcctacgatgccaccacacactttgagacaacctgcaacgacatcaaagacatctacaaacgcatggctggcacggcctttgactttgagaacatgaagcgcaaacagaacgacgtctttggagaagctgagcagtgattgtggccgcccccagcccctgctgccccagcctgtgtctgttctcctcgagggctccagcatcctctgcttcccccaccacgttcccatcacccacctcattgatccactgaccaaatccttaaccctagcgatggcttgggagatggggggttggatagcatcctctttcttggcccttccttatcctaggaaaagagggttcctctccttgtgtgtgtctcttccccccacccctaattcttctgctctgtttgggaagacgtggaggaaaaggtgacttctgcccccaccgctcttacccccactgtagtggcctttggagatgcccccacctcccccccaccaactctcgcgtgttggagagaaggggccctcccagcacaaagttgcattcctccccccctaatttattctaatttattaactttgacccaccctttctgagcctgcagccttcccgtgtggcctgagggctgtcgagtgagctgccccagccccctcccagcccttgcccagcctgggggagtggggaaggcttgggcatggccccgttggaggttgatttgctgttttgtttcttgtctttgtgttctgtggtacttgctgagagaaaagaaaagtgagccaagcagaaggaggtggaaaacggacccaaaccccagtgtgccctgccccatgcctttcctttagtggtgggaaacccttatcttgcaaagtgaatgtgtccccttccccaccctctagtgtatttcacagaaaacaaaacctcccaataaaacggttgaaacctgaaaaaaa

SEQ ID NO: 142 - DNA, 5047 bp, Homo sapiens; identical to SEQ ID NO: 107

SEQ ID NO: 143 - DNA, 417 bp, Homo sapiens
acctcccaaccaagccctccagcaaggattcaggagtgcccctcgggcctcgccatgaggctcttcctgtcgctcccggtcctggtggtggttctgtcgatcgtcttggaaggcccagccccagcccaggggaccccagacgtctccagtgccttggataagctgaaggagtttggaaacacactggaggacaaggctcgggaactcatcagccgcatcaaacagagtgaactttctgccaagatgcgggagtggttttcagagacatttcagaaagtgaaggagaaactcaagattgactcatgaggacctgaagggtgacatccaggaggggcctctgaaatttcccacaccccagcgcctgtgctgaggactcccgccatgtggccccaggtgccaccaataaaaatcctaccg

SEQ ID NO: 144 - DNA, 9078 bp, Homo sapiens
ctgaactagttgccagtgatcttgaaacgtgacagtaaccaagagataaataggtgacaatgacaggaaaattagatgtagtaaaagagagtgtttgagagcagaagctatggcaactaaagactggatttgaatccttcctagcttggtgacatgagcaaattacttgatttaagtgagcattttcccatctgtacagtggagataacgataattgtgcctgctaagaagaattgctgtgaagattagtgaaataatgcatgtaaaacatttggtacagtatgtgacacatagtacaaatagtttgctaggaagattgttattattcttcacttgtgatattgtgaagttttcatacagcaaattggacatcatgagatggattgattaaataaatagatttgaacttcaaggactggtagtgttcttgctttggaaagaagaaacttggtttatcctaataatagtaggataataatggtgaagtgataggtacaagtaatagtgtttatgatgcgctggtgatgataggaaaagaaagccattatatgggcaagagctagaagtaataaaatggtgcatttttcagtgatgtttggcctatgtagctattctctgataactataaaaatccttattattgaagattcttcaggaaaaaaaaacccttagtctgaaactttagcaccaatcccccttgccccccattgaaatacgtatttttaaaacatggcttttgataatgtgagggttttttcctttttgcgatttagcagtgctgattgtgtattgcagtagttgtgagagcattagaagcagcagtcgataggaggatggaaggtctggatgccgccttggggagttaggagattggcagacttaccctgtaccactctagccctactcctttgcccaagacagaaacacactgagatggataggagaatatgagcagttgataggaaagttctcagtggagtcaggatttaggttaggccaggagattgagaatataacagtttgtgtatgatgaaatggcatatttcacagaatgcagtaaaagcaggtagggtacaagtgcagcaacaggaagatgtcttttcttcattcagcaaacacttatttgagagcttaccatgtgctaggcacatacaaagataaataagatgcccttgatgatcctctatttaaaggagacatgtaaacaggttaacttagagtagagatggtgaatatgtgaacctgaggaaaggaagaaatagattaaattatctggagagagaggaaaagtcagcagaatggggacgagaatctttcggagctcagtgttctgataggagttatttccttgggcataggttccaagtatttttctaatataccatagaagccaggaaaactttcttctgttatctcaaatgatttaattactgacttgagtttgtgttgtctccttagacttgtgcaccatggacaattttgctgagggagatttcactgtggcggattatgccttgttagaagattgccctcacgtggatgattgtgtctttgctgctgaatttatgagcaatgattatgttcgtgtgactcagctttactgtgatggggtgggtgtgcaatataaagattatatccaaagtgagaggaatttggaatttgacatctgcagtatatggtgtagtaaaccaatttctgtcctgcaagattattgcgatgccattaaaataaacatcttctggccacttctgtttcaacatcaaaacagttccgtaatatcacgattgcatccctgtgtggacgccaacaattcacgtgcttctgagataaatttgaagaaactacaacatcttgagttgatggaagatattgtggatttggcaaagaaagttgctaatgattcattccttattggaggcttattgagaattggttgtaaaatagaaaataaaatcttggcaatggaagaagctctgaattggataaaatatgcaggcgatgtaacaattctaactaaattaggatcaattgacaattgttggcctatgttaagtattttctttactgaatacaagtaccacataactaaaattgtaatggaagactgcaatttgcttgaagaacttaaaactcaaagttgtatggattgtatagaggaaggagaactaatgaaaatgaaaggaaatgaagagttttccaaagaaagatttgatatagctattatctattacaccagagccattgaatatagacctgaaaactaccttctttatggtaaccgagctctttgttttcttcgtactggacagtttagaaatgcactcggtgatggaaagagagccactattctgaagaacacttggccaaagggtcattatcgttattgtgatgctctttctatgctgggggaatatgactgggccctgcaagcaaacataaaagctcaaaaactctgtaaaaatgaccctgagggaatcaaggatctaattcagcagcatgtaaagttacaaaaacaaatagaagacctacaaggtcgaacagcaaataaggatccaattaaagccttttatgaaaacagggcctacacacctaggagtttatcagcacctatatttactacttcacttaactttgtggagaaggaaagagatttcagaaaaattaatcacgaaatggccaacggtggtaatcagaatctaaaggtggcggatgaggcgttgaaggtagatgattgtgactgtcatcctgaattttcaccaccatcaagtcagcctccaaaacataaaggaaaacaaaaatctcgaaacaatgaatcagaaaagttcagttctagttcaccattgactttaccagcagatttgaagaacatcttggagaaacagttttctaaatcttccagagctgcacaccaggattttgctaatataatgaaaatgctgagaagcttaattcaagatggctatatggccttattggagcagcgttgccgcagcgctgcacaggcctttacagagttgctgaacggtttagatcctcaaaaaataaagcaattgaacctggccatgattaactatgttttggtcgtctatggacttgccatttctctccttggaataggacagcctgaggaattatctgaagccgaaaaccagtttaagaggattattgaacactaccccagtgagggccttgattgcttggcctactgtggaattggaaaagtgtatttgaaaaaaaacagatttctagaagctctcaatcactttgagaaagcaagaaccttgatttatcgtcttcctggagtgttaacttggcccacgagtaatgtgattattgaagagtctcagccacaaaaaataaagatgctgttagagaaatttgttgaagaatgcaagttccctccagtgccagatgccatttgttgctatcagaagtgccatggatattctaagatccagatatacataactgatccagactttaagggttttatacgcatcagctgttgccagtactgtaaaatagaatttcacatgaattgctggaagaagttaaaaactacaacctttaatgataaaattgacaaggattttctacaaggaatatgtcttacccctgactgtgaaggtgtcatttctaagattatcatcttcagcagtggtggtgaagttaaatgtgaatttgaacacaaggtcataaaagaaaaggttcctccaagacctattctgaaacagaaatgttctagcctagagaaactaagactgaaagaagacaaaaaattgaagagaaagatccaaaaaaaagaagcaaaaaagttagcacaagaaagaatggaggaggacttaagagaaagtaatccacccaaaaatgaagagcagaaagaaactgtagacaatgttcagcgttgtcagttccttgatgacagaattctacagtgtataaagcagtatgctgacaagattaaatccggcatacagaatacagccatgcttctcaaagaattgctttcttggaaagttttgagcacagaagactatacaacctgtttttctagcagaaattttctaaatgaagcagtggactatgttattcgccacttgattcaagaaaataacagagtaaagacaagaatatttctgcatgttttgagtgagcttaaagaagtggagcccaaattagccgcctggatccaaaaacttaatagctttggcttagatgccacaggaactttcttttctcgttatggagcatctcttaaactgcttgattttagtatcatgactttcctctggaatgagaaatatggtcacaaactagactctatagaaggaaagcaacttgattatttctctgagccagcatcattgaaggaagcccgttgtttaatatggctgctagaagaacacagagacaagttcccagcattgcatagtgctttagatgaattctttgatataatggacagccgctgtactgtgttaaggaaacaagatagtggtgaagcaccgtttagttcaaccaaggtgaaaaacaaaagcaagaaaaagaagccaaaggattcaaagcctatgttagttgggtctggaacaacttcagtaacttcaaataatgagatcatcacttcaagtgaagaccatagcaatcgaaattcagattctgcaggcccatttgcagtgcctgaccatcttcggcaagatgtagaagaattcgaagctctctatgaccaacacagtaacgaatatgttgtccgcaataagaagctatgggacatgaacccaaaacaaaaatgttcaactctatatgattacttctctcagtttttggaggaacatggtcccttggacatgagtaacaagatgttctctgcagaatatgagtttttcccagaagaaactcgacagatactagaaaaagcaggaggtttaaaaccttttctcttgggatgccctcgttttgttgtgattgacaactgtattgcactgaagaaggttgcatcacggctcaagaaaaaaaggaagaagaaaaacattaaaacaaaagtagaagaaatttcaaaagcaggggagtatgtacgagttaaactacaactgaatccagctgctagggaatttaaaccagatgtaaagtctaaaccagtgtcagattcatcttcagcaccagcttttgaaaatgtgaaacccaaacctgtgtctgcaaattctcccaagccagcttgtgaagatgtgaaggccaaaccagtatccgacaattcttctagacaagtttctgaggatgggcaacccaaaggggtctcttctaattctcctaaaccaggctctgaggatgcaaattacaagcgagtctcctgtaattcccccaaaccggttcttgaggatgtgaaaccaacttattgggctcaatcccatttggtcacaggatactgtacgtatcttcctttccagagatttgatatcacccagacaccgccagcatacataaacgtgttaccaggtttgccccagtacaccagcatatatacacccttggccagcctttctcctgaatatcagctaccaagatcagtaccagtggtgccgtcttttgtagccaatgacagagcagataaaaatgctgctgcctattttgagggtcatcatttgaatgctgagaatgttgctggtcaccagattgcctctgaaacacagatccttgagggctctttgggaatatctgtaaagtcacactgcagcacaggtgatgctcatacagtcctgagtgagtctaacagaaatgatgagcactgtggaaattctaacaacaaatgtgaagtaattccagaaagcaccagtgcagtaacaaacattccacacgtgcagatggttgccatacaggtatcttggaacataatacaccaagaagtcaatactgagccatataatccttttgaggaacgacaaggggaaatttcacggattgaaaaggagcaccaagtattacaagaccaacttcaagaagtgtatgaaaattatgagcagataaaacttaagggcttagaagagaccagggacctggaagagaagttgaaaaggcacttagaagaaaacaagatctcaaagacggaattagattggttccttcaagatttggaaagagaaattaaaaaatggcaacaggaaaaaaaagaaatccaagaaagactaaaatcactgaagaagaaaattaaaaaggtttcaaatgccagtgaaatgtatacccagaaaaatgatggaaaggaaaaggaacatgaattacatctggatcagtcccttgaaatcagcaacacacttacaaatgagaaaatgaaaatagaagagtatataaagaaagggaaagaggattatgaagagagtcatcagagagctgtggctgcagaggtatccgtacttgaaaactggaaggagagtgaagtgtataagctacagatcatggagtcacaagcagaagcctttctgaagaagctggggctgattagccgtgatcctgcagcatatcctgacatggagtctgatatacgttcatgggaattgtttctttctaatgttacaaaagaaattgagaaagcaaagtctcagtttgaagaacaaattaaggcaattaaaaatggttctcggctcagtgaactttctaaagtgcagatttctgagctttcatttcctgcctgtaacacggttcatcccgagttactccctgagtcttcaggccacgatggccaagggcttgtgacttctgcaagcgacgtgactggaaaccacgcagcacttcacagggatcctagtgtgttctctgctggtgattccccaggggaggctccttctgcgctgttgccagggccaccccctggtcagcctgaagccactcagctgacagggccaaaacgggctggccaggcagctctgtcagaacgaagccctgtggctgatcggaagcagcctgttcctccaggacgtgctgcgcgttcaagccagtctccaaaaaagccgttcaatagtattattgagcacctgtcagtggtattcccatgttacaacagcactgagcttgctggttttattaaaaaagtgcgaagcaaaaacaagaactcactctcaggattgagtattgatgaaattgtccaaagagtgacagaacacattctagatgaacagaaaaagaaaaagccaaacccaggaaaggacaagaggacttatgagcccagctctgccacccccgtgaccaggtcctcccagggctcaccctcggtggttgttgcaccatcacccaaaaccaaggggcagaaagcagaagatgtccctgtgaggattgcactgggtgcaagttcctgtgaaatatgccacgaggtgttcaaatcaaaaaacgtgcgtgtgctcaaatgtgggcacaagtatcacaaagggtgctttaagcagtggcttaaagggcagagcgcttgcccggcctgccagggtcgtgatctcctgacagaagagtcaccttctggaagaggctggcccagtcagaatcaggagctgccttcctgctcttctaggtagtcacacttcactaaagtgtcatccaccagtgtgttgaatccgaagaatgacaattttctaccactggtgtaaaaaacaaacatttgaagacccttgtgcattgtgtgtcacaaagctaaatacatggaaatcgttaatatcgctgatattaagtaatttccccactctgagtgaatactttgatgattgccaacagtggctaataaaatgacggctaccacactcatgggtcactggggctgcgcagggctctttgaggtgggtggcttcttttggaaagtactatgaacgtctcgaagcagtattctagtgataagaattcttaacatagccaagcgccccacgtttgttccccacgtttgttccccttttctgtttgaaaaacctgttctggtagctccacaagagagatgatactgactttttaaattttttacaagagtctgtattcctgatatgcctatatttttcctcaaagattctgcattttaaggatgggcataagcaaactatattttaataatttatagttaatgttaaaatattggctgatttagaccaaaagattcaaatctcctctttgtgaaatcccatctgcatttgattttttattattttatgttcccccgttagattgttttaagtgtttgcttttcatcttttatagatgtaatctgattttcaaaaatcattaacactttttaattagtatcgactaagactttttccccctggaatcgaggctgtgtgtccgtcatcccagcccccggttggagcctgctctttgaactccgctgccttccttagcagcttctgtcctcttctgtgagtcagtcagcgagtgcttgggatccgcatccagccgtgctgagcacacaacaggctgtgtgtggaaatggccaccaccattctccttccccaccccaccacaaaaagagaagctgtgtctttagacaaccctgaggtatctgtgttacaatcgttctgtgtttgatatttgtgtaaagtatgcatgcagtcttgtactgtgacctaagaacaaaactgtaactgcattagaaaccatgaaaaaattagatattgttttgtgacttttagacagtggtaaatatagaaccatgaattctggtcacattccatttctctccaacatgaaggatcaaaaaatgtttttcaatgtgttctttgttccactggaaacttagagtcatgagtttatgagctgatttggtcaccttcctctgcctttgttcactgtgagttctgatgtcttagtgacttagttcttagaagctcacgccttagtttgaaacagattctccacggtggtccccaaaacactgtctgcatatccataagaattgagcgctatgggtgttaacgtgcatgaggatcagtttgcagcagcaagtacaaaaggagaagaggaacatccgttgaatgagtgtgttttgtacataacttcagatacttgtgaacatgccttatatttgtccaacaactgtcagaataaagaacattctaaaatgag

SEQ ID NO: 145 - DNA, 3041 bp, Homo sapiens
tgggtgttctccgcggcgccgagtcccgggagcgcggtgggggcagcgggcgcggggcgggcgcggggaccgcgccagcctgtcactaatgtctccctttgtgtctcccccatctcatccttttccccggcgcgccgtgcccgccgaccccacaggaaggcctggacgacggcccggacttcctctcagaagaggaccgcggacttaaagcaataaatgtagatcttcaaagtgatgctgctctgcaggtggacatttctgatgctcttagtgagcgggataaagtaaaattcactgttcacacaaagagttcattgccaaattttaaacaaaacgagttttcagttgttcggcaacatgaggaatttatctggcttcatgattcctttgttgaaaatgaagactatgcaggttatatcattccaccagcaccaccaagacctgattttgatgcttcaagggaaaaactacagaagcttggtgaaggagaagggtcaatgacgaaggaagaattcacaaagatgaaacaggaactggaagctgaatatttggcaatattcaagaagacagttgcgatgcatgaagtgttcctgtgtcgtgtggcagcacatcctattttgagaagagatttaaatttccatgtcttcttggaatataatcaagatgtgagtgtgcgaggaaaaaataaaaaagagaaacttgaagacttctttaaaaacatggttaaatcagcagatggagtaatcgtttcaggagtaaaggatgtagatgatttctttgagcacgaacgaacatttcttttggagtatcataaccgagttaaggatgcatctgctaaatctgatagaatgacaagatcccacaaaagtgctgcagatgattacaatagaattggttcttcattatatgctttaggaactcaggattctacagatatatgcaagttttttctcaaagtttcagaactgttcgataaaacaagaaaaatagaagcacgagtgtctgctgatgaagacctcaaactttctgatcttttaaaatattacttaagagaatctcaagctgctaaggatctcctgtatcgaaggtctaggtcactagtggattatgaaaatgctaataaagcactggataaagcaagagcaaaaaataaagatgttctacaggccgaaacttcccaacaattatgttgtcagaaatttgaaaaaatatctgagtctgcaaaacaagaacttatagattttaagacaagaagagttgctgcattcagaaaaaatttagtggaactggcagagttagaactgaagcatgcaaagggtaatctacagttgctgcagaactgcctggcagtgttaaatggagacacataagccacactccgccttcctgttaaaaagggctgccttccttcaaattttatttttgttttcttaatgatgttaagcatttatgctcactggaaacaaacaaaaagcagctgaaaaagtgcatcaactcctctttttctgagaaacatggagcagcgcacgcccaggcgatgccagtctgtgtgccgtgatgccgcactgtgttccccatgacagtggtccatcatcgtgcactcgtcatactcagaagtccaaagttcattcttctttaaagtagcctctataactctgtttattttataaatagtattccttatggctgccactcttatttacctttaaataatttctgaaatttaaccttttcagaatgcattgttgaaacaagataaagattgccttttttgaattttttaaattttgtttttaaaagcatataccaccttagttcattcatgtatcctggtaaagcatcttaatcagacttatttttaattactgaatatttcttagacgttttgggacagattttatgtaatctttataagtatgatttctgaagaaaagcaaatgcattagtatgtttgccttaaacttgtagactaaaccaagtattgtaaaataaacagcgataacagtgatagtttttaactctatggtcattgtatcactctggaaaatgtggagtagctgtaataaatctactcctgtattatgctttacagtgcaggtcttagtttttcttttttctcatttcttttgaaatggcatctcgaacaaagtccaccaatccctttacaaaagaatgaactgctcctctgtgtgtacttcatagaaggtggaatcggacagaggcaggttagtgacagttattcctgaaatacaggagcagagtacagtctgttgtggtttcccggattccgcgcctagctcagccaattaagcatgagacataggccattgagccacttagtagttatgcgagtggatagattggtatgtagagggaaagaggtctgctgtaaagaacaacacttgtttgtctgtggggaaagaaaagcagaatacttgagatgaaagttggcatacaaataggatactatcgccagtagttatattacaaacattatcggcctttctagtgtgaatgaacattagacacattattgtcattcctagtttaaagttaaggttgcgtggttggatttttccactatctttttagtttgtttacattttcctgaaccctcctgagcgcccgttcttggtctaatccccagtcgtgatgattccacacttcctcagccgcatgttgtcttgcctcattcatgagctggtcagcgtttcgtctctttaactgacatgttccccagtgctgtttgaactgttgagtttccgttgctggctgagtgcgttttgtccttcacgtaaccttcgctggtaaaaataagcccatgtgatgtccaccagtggatgaatgctggaccgagagccctagcttctggatccaggtctaggcccttcatctgctgctctgtggcccagggcaggtttgcttgacctctgcctcagttctcgactctaaaggacatactgacctacctcacaggggtgttgtgaggattaataaatgttggtactctgctttggaaaaaaaaaaaaaaaaaaaaaaaa

SEQ ID NO: 146 - DNA, 2913 bp, Homo sapiens
gggggagcccctgcaagtttcccgggccgcgcgccgcgctcgctcgcctcccagcccgcggcccgagccgccgccgcgcccgccatgccctcggccaaacaaaggggctccaagggcggccacggcgccgcgagcccctcggagaagggtgcccacccgtcgggcggcgcggatgacgtggcgaagaagccgccgccggcgccgcagcagccgccgccgccgcccgcgccgcacccgcagcagcacccgcagcagcacccgcagaaccaggcgcacggcaagggcggccaccgcggcggcggcggcggcggcggcaagtcctcctcctcctcctccgcctccgccgccgctgccgccgccgccgcctcgtcctcggcgtcctgctcgcgcaggctcggcagggcgctcaactttctcttctacctcgccctggtggcggcggccgctttctcgggctggtgcgtccaccacgtcctggaggaggtccagcaggtccggcgcagccaccaggacttctcccggcagagggaggagctgggccagggcttgcagggcgtcgagcagaaggtgcagtctttgcaagccacatttggaacttttgagtccatcttgagaagctcccaacataaacaagacctcacagagaaagctgtgaagcaaggggagagtgaggtcagccggatcagcgaagtgctgcagaaactccagaatgagattctcaaagacctctcggatgggatccatgtggtgaaggacgcccgggagcgggacttcacgtccctggagaacacggtggaggagcggctgacggagctcaccaaatccatcaacgacaacatcgccatcttcacagaagtccagaagaggagccagaaggagatcaatgacatgaaggcaaaggttgcctccctggaagaatctgaggggaacaagcaggatttgaaagccttaaaggaagctgtgaaggagatacagacctcagccaagtccagagagtgggacatggaggccctgagaagtacccttcagactatggagtctgacatctacaccgaggttcgcgagctggtgagcctcaagcaggagcagcaggctttcaaggaggcggccgacacggagcggctcgccctgcaggccctcacggagaagcttctcaggtctgaggagtccgtctcccgcctcccggaggagatccggagactggaggaagagctccgccagctgaagtccgattcccacgggccgaaggaggacggaggcttcagacactcggaagcctttgaggcactccagcaaaagagtcagggactggactccaggctccagcacgtggaggatggggtgctctccatgcaggtggcttctgcgcgccagaccgagagcctggagtccctcctgtccaagagccaggagcacgagcagcgcctggccgccctgcaggggcgcctggaaggcctcgggtcctcagaggcagaccaggatggcctggccagcacggtgaggagcctgggcgagacccagctggtgctctacggtgacgtggaggagctgaagaggagtgtgggcgagctccccagcaccgtggaatcactccagaaggtgcaggagcaggtgcacacgctgctcagtcaggaccaagcccaggccgcccgtctgcctcctcaggacttcctggacagactttcttctctagacaacctgaaagcctcagtcagccaagtggaggcggacttgaaaatgctcaggactgctgtggacagtttggttgcatactcggtcaaaatagaaaccaacgagaacaatctggaatcagccaagggtttactagatgacctgaggaatgatctggataggttgtttgtgaaagtggagaagattcacgaaaaggtctaaatgaattgcgtgtgcagggcgcggatttaaagtccaatttctcatgaccaaaaaatgtgtggttttttcccatgtgtcccctaccccccaatttcttgtcccctcttaaagagcagttgtcaccacctgaacaccaaggcattgtattttcatgcccagttaacttatttacaatatttaagttctctgcttctgcatttggttggtttcctgaagcgcagcccctgtgaataacaggtggcttttcatggatgtctctagtcagagaaaaatgataaaggcttaaattgaggattaacagaagcagattaacctcagaaatcctgtctggctggcagatttcaagtaaaaaaaaaaaaaaggtgggttggggggacccttttctttctagttgtctttaaggaaaattaattttacttttttttttgttctggccgaaatttttatgagatatctctcacttgtcttccactttgaaccggttaaagctcatagctgtcagctctgaatgaggaggggagaagcccctgggtctttctttgaaaggaatccgctgcttgagggctgcctccctcatggtgtgcgtgtcgttctcttcctgacgcatctgtgatatcagaggtaactatgcaaagcatccaggcggttctgaatgtgaagcactacacccagcagagtcccggtgccctctgtccccactgccggcccatgtcctctctccggaggtcaccaaggaatgcacaggtttcgactaccagaaaggggagtccttgggttctttcaaaaaattcgtgaggagagctgtctacagtggaatagggggtctccctggggaatgcaggccaagtccttttattttaacatgatgtccatgaagaggtttgccgtctgggcagccctgtcggcaaggagcgtgcatactgcgtttgtgtaattgtttgctgtatctcccttccctctgagctgtattgttctttaatggctgtcttgcccttccaaaaaaaattgaaaaaaaaaaaa

SEQ ID NO: 147 - DNA, 1594 bp, Homo sapiens
gcccgccggtccacgccgcgcaccgctccgagggccagcgccacccgctccgcagccggcaccatgcgcgagatcgtgcacatccaggcgggccagtgcggcaaccagatcggcgccaagttttgggaggtcatcagcgatgagcatgggatcgaccccacaggcagttaccatggagacagtgacttgcagctggagagaatcaacgtgtactacaatgaggctgctggtaacaaatatgtacctcgggccatcctggtggatctggagcctggcaccatggactctgtcaggtctggacccttcggccagatcttcagaccagacaacttcgtgttcggccagagtggagccgggaataactgggccaagggccactacacagagggagccgagctggtcgactcggtcctggatgtggtgaggaaggagtcagagagctgtgactgtctccagggcttccagctgacccactctctggggggcggcacggggtccgggatgggcaccctgctcatcagcaagatccgggaagagtacccagaccgcatcatgaacaccttcagcgtcatgccctcacccaaggtgtcagacacggtggtggagccctacaacgccaccctctcggtccaccagctggtggaaaacacagatgaaacctactccattgataacgaggccctgtatgacatctgcttccgcaccctgaagctgaccacccccacctacggggacctcaaccacctggtgtcggccaccatgagcggggtcaccacctgcctgcgcttcccgggccagctgaacgcagacctgcgcaagctggcggtgaacatggtgcccttccctcgcctgcacttcttcatgcccggcttcgcgcccctgaccagccggggcagccagcagtaccgggcgctcacggtgcccgagctcacccagcagatgttcgactccaagaacatgatggccgcctgcgacccgcgccacggccgctacctgacggtggctgccatcttccggggccgcatgtccatgaaggaggtggacgagcagatgctcaacgtgcagaacaagaacagcagctacttcgtggagtggatccccaacaacgtgaagacggccgtgtgcgacatcccgccccgcggcctgaagatgtcggccaccttcatcggcaacagcacggccatccaggagctgttcaagcgcatctccgagcagttcacggccatgttccggcgcaaggccttcctgcactggtacacgggcgagggcatggacgagatggagttcaccgaggccgagagcaacatgaacgacctggtgtccgagtaccagcagtaccaggacgccacggccgacgaacaaggggagttcgaggaggaggagggcgaggacgaggcttaaaaacttctcagatcaatcgtgcatccttagtgaacttctgttgtcctcaagcatggtctttctacttgtaaactatggtgctcagttttgcctctgttagaaattcacactgttgatgtaatgatgtggaactcctctaaaaattacagtattgtctgtgaaggtatctatactaataaaaaagcatgtgtag

SEQ ID NO: 148 - protein, 104 aa, Homo sapiens
MGQCRSANAEDAQEFSDVERAIETLIKNFHQYSVEGGKETLTPSELRDLVTQQLPHLMPSNCGLEEKIANLGSCNDSKLEFRSFWELIGEAAKSVKLERPVRGH

SEQ ID NO: 149 - protein, 146 aa, Homo sapiens
MLAGAGRPGLPQGRHLCWLLCAFTLKLCQAEAPVQEEKLSASTSNLPCWLVEEFVVAEECSPCSNFRAKTTPECGPTGYVEKITCSSSKRNEFKSCRSALMEQRLFWKFEGAVVCVALIFACLVIIRQRQLDRKALEKVRKQIESI

SEQ ID NO: 150 - protein, 882 aa, Homo sapiens
MGPWSRSLSALLLLLQVSSWLCQEPEPCHPGFDAESYTFTVPRRHLERGRVLGRVNFEDCTGRQRTAYFSLDTRFKVGTDGVITVKRPLRFHNPQIHFLVYAWDSTYRKFSTKVTLNTVGHHHRPPPHQASVSGIQAELLTFPNSSPGLRRQKRDWVIPPISCPENEKGPFPKNLVQIKSNKDKEGKVFYSITGQGADTPPVGVFIIERETGWLKVTEPLDRERIATYTLFSHAVSSNGNAVEDPMEILITVTDQNDNKPEFTQEVFKGSVMEGALPGTSVMEVTATDADDDVNTYNAAIAYTILSQDPELPDKNMFTINRNTGVISVVTTGLDRESFPTYTLVVQAADLQGEGLSTTATAVITVTDTNDNPPIFNPTTYKGQVPENEANVVITTLKVTDADAPNTPAWEAVYTILNDDGGQFVVTTNPVNNDGILKTAKGLDFEAKQQYILHVAVTNVVPFEVSLTTSTATVTVDVLDVNEAPIFVPPEKRVEVSEDFGVGQEITSYTAQEPDTFMEQKITYRIWRDTANWLEINPDTGAISTRAELDREDFEHVKNSTYTALIIATDNGSPVATGTGTLLLILSDVNDNAPIPEPRTIFFCERNPKPQVINIIDADLPPNTSPFTAELTHGASANWTIQYNDPTQESIILKPKMALEVGDYKINLKLMDNQNKDQVTTLEVSVCDCEGAAGVCRKAQPVEAGLQIPAILGILGGILALLILILLLLLFLRRRAVVKEPLLPPEDDTRDNVYYYDEEGGGEEDQDFDLSQLHRGLDARPEVTRNDVAPTLMSVPRYLPRPANPDEIGNFIDENLKAADTDPTAPPYDSLLVFDYEGSGSEAASLSSLNSSESDKDQDYDYLNEWGNRFKKLADMYGGGEDD

SEQ ID NO: 151 - protein, 381 aa, Homo sapiens
MSSRIARALALVVTLLHLTRLALSTCPAACHCPLEAPKCAPGVGLVRDGCGCCKVCAKQLNEDCSKTQPCDHTKGLECNFGASSTALKGICRAQSEGRPCEYNSRIYQNGESFQPNCKHQCTCIDGAVGCIPLCPQELSLPNLGCPNPRLVKVTGQCCEEWVCDEDSIKDPMEDQDGLLGKELGFDASEVELTRNNELIAVGKGSSLKRIPVFGMEPRIRYNPLQGQKCIVQTTSWSQCSKTCGTGISTRVTNDNPECRLVKETRICEVRPCGQPVYSSLKKGKKCSKTKKSPEPVRFTYAGCLSVKKYRPKYCGSCVDGRCCTPQLTRTVKMRFRCEDGETFSKNVMMIQSCKCNYNCPHANEAAFPFYRLFNDIHKFRD

SEQ ID NO: 152 - protein, 683 aa, Homo sapiens
MALFVRLLALALALALGPAATLAGPAKSPYQLVLQHSRLRGRQHGPNVCAVQKVIGTNRKYFTNCKQWYQRKICGKSTVISYECCPGYEKVPGEKGCPAALPLSNLYETLGVVGSTTTQLYTDRTEKLRPEMEGPGSFTIFAPSNEAWASLPAEVLDSLVSNVNIELLNALRYHMVGRRVLTDELKHGMTLTSMYQNSNIQIHHYPNGIVTVNCARLLKADHHATNGVVHLIDKVISTITNNIQQIIEIEDTFETLRAAVAASGLNTMLEGNGQYTLLAPTNEAFEKIPSETLNRILGDPEALRDLLNNHILKSAMCAEAIVAGLSVETLEGTTLEVGCSGDMLTINGKAIISNKDILATNGVIHYIDELLIPDSAKTLFELAAESDVSTAIDLFRQAGLGNHLSGSERLTLLAPLNSVFKDGTPPIDAHTRNLLRNHIIKDQLASKYLYHGQTLETLGGKKLRVFVYRNSLCIENSCIAAHDKRGRYGTLFTMDRVLTPPMGTVMDVLKGDNRFSMLVAAIQSAGLTETLNREGVYTVFAPTNEAFRALPPRERSRLLGDAKELANILKYHIGDEILVSGGIGALVRLKSLQGDKLEVSLKNNVVSVNKEPVAEPDIMATNGVVHVITNVLQPPANRPQERGDELADSALEIFKQASAFSRASQRSVRLAPVYQKLLERMKH

SEQ ID NO: 153 - protein, 72 aa, Homo sapiens
MASASCSPGGALASPEPGRKILPRMISHSELRKLFYSADAVCFDVDSTVISEEGIGCFHWIWRKCDQATSQG

SEQ ID NO: 154 - protein, 266 aa, Homo sapiens
MMALGAAGATRVFVAMVAAALGGHPLLGVSATLNSVLNSNAIKNLPPPLGGAAGHPGSAVSAAPGILYPGGNKYQTIDNYQPYPCAEDEECGTDEYCASPTRGGDAGVQICLACRKRRKRCMRHAMCCPGNYCKNGICVSSDQNHFRGEIEETITESFGNDHSTLDGYSRRTTLSSKMYHTKGQEGSVCLRSSDCASGLCCARHFWSKICKPVLKEGQVCTKHRRKGSHGLEIFQRCYCGEGLSCRIQKDHHQASNSSRLHTCQRH

SEQ ID NO: 155 - protein, 280 aa, Homo sapiens
MAEKFDCHYCRDPLQGKKYVQKDGHHCCLKCFDKFCANTCVECRKPIGADSKEVHYKNRFWHDTCFRCAKCLQPLANETFVAKDNKILCNKCTTREDFPKCKGCFKAIVAGDQNVEYKGTVWHKDCFTCSNCKQVIGTGSFFPKGEDFYCVTCHETKLAKHCVKCNKAITSGGITYQDQPWHADCFVCVTCSKKLAGQRFTAVEDQYYCVDCYKNFVAKKCAGCKNPITGFGKGSSVVAYEGQSWHDYCFHCKKCSVNLANKRFVFHQEQVYCPDCAKKL

SEQ ID NO: 156 - protein, 173 aa, Homo sapiens
MAAMASLGALALLLLSSLSRCSAEACLEPQITPSYYTTSDAVISTETVFIVEISLTCKNRVQNMALYADVGGKQFPVTRGQDVGRYQVSWSLDHKSAHAGTYEVRFFDEESYSLLRKAQRNNEDISIIPPLFTVSVDHRGTWNGPWVSTEVLAAAIGLVIYYLAFSAKSHIQA

SEQ ID NO: 157 - protein, 114 aa, Homo sapiens
MTCKMSQLERNIETIINTFHQYSVKLGHPDTLNQGEFKELVRKDLQNFLKKENKNEKVIEHIMEDLDTNADKQLSFEEFIMLMARLTWASHEKMHEGDEGPGHHHKPGLGEGTP

SEQ ID NO: 158 - protein, 248 aa, Homo sapiens [sequence omitted]

SEQ ID NO: 159 - protein, 397 aa, Homo sapiens
MRSPSAAWLLGAAILLAASLSCSGTIQGTNRSSKGRSLIGKVDGTSHVTGKGVTVETVFSVDEFSASVLTGKLTTVFLPIVYTIVFVVGLPSNGMALWVFLFRTKKKHPAVIYMANLALADLLSVIWFPLKIAYHIHANNWIYGEALCNVLIGFFYGNMYCSILFMTCLSVQRYWVIVNPMGHSRKKANIAIGISLAIWLLILLVTIPLYVVKQTIFIPALNITTCHDVLPEQLLVGDMFNYFLSLAIGVFLFPAFLTASAYVLMIRMLRSSAMDENSEKKRKRAIKLIVTVLAMYLICFTPSNLLLVVHYFLIKSQGQSHVYALYIVALCLSTLNSCIDPFVYYFVSHDFRDHAKNALLCRSVRTVKQMQVSLTSKKHSRKSSSYSSSSTTVKTSY

SEQ ID NO: 160 - protein, 383 aa, Homo sapiens
MAGIPGLLFLLFFLLCAVGQVSPYSAPWKPTWPAYRLPVVLPQSTLNLAKPDFGAEAKLEVSSSCGPQCHKGTPLPTYEEAKQYLSYETLYANGSRTETQVGIYILSSSGDGAQHRDSGSSGKSRRKRQIYGYDSRFSIFGKDFLLNYPFSTSVKLSTGCTGTLVAEKHVLTAAHCIHDGKTYVKGTQKLRVGFLKPKFKDGGRGANDSTSAMPEQMKFQWIRVKRTHVPKGWIKGNANDIGMDYDYALLELKKPHKRKFMKIGVSPPAKQLPGGRIHFSGYDNDRPGNLVYRFCDVKDETYDLLYQQCDAQPGASGSGVYVRMWKRQQQKWERKIIGIFSGHQWVDMNGSPQDFNVAVRITPLKYAQICYWIKGNYLDCREG

SEQ ID NO: 161 - protein, 522 aa, Homo sapiens
MSLRVHTLPTLLGAVVRPGCRELLCLLMITVTVGPGASGVCPTACICATDIVSCTNKNLSKVPGNLFRLIKRLDLSYNRIGLLDSEWIPVSFAKLNTLILRHNNITSISTGSFSTTPNLKCLDLSSNKLKTVKNAVFQELKVLEVLLLYNNHISYLDPSAFGGLSQLQKLYLSGNFLTQFPMDLYVGRFKLAELMFLDVSYNRIPSMPMHHINLVPGKQLRGIYLHGNPFVCDCSLYSLLVFWYRRHFSSVMDFKNDYTCRLWSDSRHSRQVLLLQDSFMNCSDSIINGSFRALGFIHEAQVGERLMVHCDSKTGNANTDFIWVGPDNRLLEPDKEMENFYVFHNGSLVIESPRFEDAGVYSCIAMNKQRLLNETVDVTINVSNFTVSRSHAHEAFNTAFTTLAACVASIVLVLLYLYLTPCPCKCKTKRQKNMLHQSNAHSSILSPGPASDASADERKAGAGKRVVFLEPLKDTAAGQNGKVRLFPSEAVIAEGILKSTRGKSDSDSVNSVFSDTPFVAST

SEQ ID NO: 162 - protein, 469 aa, Homo sapiens
MSIHFSSPVFTSRSAAFSGRGAQVRLSSARPGGLGSSSLYGLGASRPRVAVRSAYGGPVGAGIREVTINQSLLAPLRLDADPSLQRVRQEESEQIKALNNKFASFIDKVRFLEQQNKLLETKWTLLQEQKSAKSSRLPDIFEAQIAGLRGQLEALQVDGGRLEQGLRTMQDVVEDFKNKYEDEINRRTAAENEFVVLKKDVDAAYMSKVELEAKVDALNDEINFLRTLNETELTELQSQISDTSVVLSMDNSRSLDLDGIIAEVKAQYEEMAKCSRAEAEAWYQTKFETLQAQAGKHGDDLRNTRNEISEMNRAIQRLQAEIDNIKNQRAKLEAAIAEAEECGELALKDARAKQEELEAALQRAKQDMARQLREYQELMSVKLALDIEIATYRKLLEGEESRLAGDGVGAVNISVMNSTGGSSSGGGIGLTLGGTMGSNALSFSSSAGPGLLKAYSIRTASASRRSARD

SEQ ID NO: 163 - protein, 211 aa, Homo sapiens [sequence omitted]

SEQ ID NO: 164 - protein, 90 aa, Homo sapiens
MRDPVSSQYSSFLFWRMPIPELDLSELEGLGLSDTATYKVKDSSVGKMIGQATAADQEKNPEGDGLLEYSTFNFWRAPIASIHSFELDLL

SEQ ID NO: 165 - protein, 1019 aa, Homo sapiens
MLQGTCSVLLLWGILGAIQAQQQEVISPDTTERNNNCPEKTDCPIHVYFVLDTSESVTMQSPTDILLFHMKQFVPQFISQLQNEFYLDQVALSWRYGGLHFSDQVEVFSPPGSDRASFIKNLQGISSFRRGTFTDCALANMTEQIRQDRSKGTVHFAVVITDGHVTGSPCGGIKLQAERAREEGIRLFAVAPNQNLKEQGLRDIASTPHELYRNDYATMLPDSTEINQDTINRIIKVMKHEAYGECYKVSCLEIPGPSGPKGYRGQKGAKGNMGEPGEPGQKGRQGDPGIEGPIGFPGPKGVPGFKGEKGEFGADGRKGAPGLAGKNGTDGQKGKLGRIGPPGCKGDPGNRGPDGYPGEAGSPGERGDQGGKGDPGRPGRRGPPGEIGAKGSKGYQGNNGAPGSPGVKGAKGGPGPRGPKGEPGRRGDPGTKGSPGSDGPKGEKGDPGPEGPRGLAGEVGNKGAKGDRGLPGPRGPQGALGEPGKQGSRGDPGDAGPRGDSGQPGPKGDPGRPGFSYPGPRGAPGEKGEPGPRGPEGGRGDFGLKGEPGRKGEKGEPADPGPPGEPGPRGPRGVPGPEGEPGPPGDPGLTECDVMTYVRETCGCCDCEKRCGALDVVFVIDSSESIGYTNFTLEKNFVINVVNRLGAIAKDPKSETGTRVGVVQYSHEGTFEAIQLDDEHIDSLSSFKEAVKNLEWIAGGTWTPSALKFAYDRLIKESRRQKTRVFAVVITDGRHDPRDDDLNLRALCDRDVTVTAIGIGDMFHEKHESENLYSIACDKPQQVRNMTLFSDLVAEKFIDDMEDVLCPDPQIVCPDLPCQTELSVAQCTQRPVDIVFLLDGSERLGEQNFHKARRFVEQVARRLTLARRDDDPLNARVALLQFGGPGEQQVAFPLSHNLTAIHEALETTQYLNSFSHVGAGVVHAINAIVRSPRGGARRHAELSFVFLTDGVTGNDSLHESAHSMRKQNVVPTVLALGSDVDMDVLTTLSLGDRAAVFHEKDYDSLAQPGFFDRFIRWIC

SEQ ID NO: 166 - protein, 1028 aa, Homo sapiens
MRAARALLPLLLQACWTAAQDEPETPRAVAFQDCPVDLFFVLDTSESVALRLKPYGALVDKVKSFTKRFIDNLRDRYYRCDRNLVWNAGALHYSDEVEIIQGLTRMPGGRDALKSSVDAVKYFGKGTYTDCAIKKGLEQLLVGGSHLKENKYLIVVTDGHPLEGYKEPCGGLEDAVNEAKHLGVKVFSVAITPDHLEPRLSIIATDHTYRRNFTAADWGQSRDAEEAISQTIDTIVDMIKNNVEQVCCSFECQPARGPPGLRGDPGFEGERGKPGLPGEKGEAGDPGRPGDLGPVGYQGMKGEKGSRGEKGSRGPKGYKGEKGKRGIDGVDGVKGEMGYPGLPGCKGSPGFDGIQGPPGPKGDPGAFGLKGEKGEPGADGEAGRPGARGPSGDEGPAGEPGPPGEKGEAGDEGNPGPDGAPGERGGPGERGPRGTPGPRGPRGDPGEAGPQGDQGREGPVGVPGDPGEAGPIGPKGYRGDEGPPGSEGARGAPGPAGPPGDPGLMGERGEDGPAGNGTEGFPGFPGYPGNRGAPGINGTKGYPGLKGDEGEAGDPGDDNNDIAPRGVKGAKGYRGPEGPQGPPGHQGPPGPDECEILDIIMKMCSCCECKCGPIDLLFVLDSSESIGLQNFEIAKDFVVKVIDRLSRDELVKFEPGQSYAGVVQYSHSQMQEHVSLRSPSIRNVQELKEAIKSLQWMAGGTFTGEALQYTRDQLLPPSPNNRIALVITDGRSDTQRDTTPLNVLCSPGIQVVSVGIKDVFDFIPGSDQLNVISCQGLAPSQGRPGLSLVKENYAELLEDAFLKNVTAQICIDKKCPDYTCPITFSSPADITILLDGSASVGSHNFDTTKRFAKRLAERFLTAGRTDPAHDVRVAVVQYSGTGQQRPERASLQFLQNYTALASAVDAMDFINDATDVNDALGYVTRFYREASSGAAKKRLLLFSDGNSQGATPAAIEKAVQEAQRAGIEIFVVVVGRQVNEPHIRVLVTGKTAEYDVAYGESHLFRVPSYQALLRGVFHQTVSRKVALG

SEQ ID NO: 167 - protein, 506 aa, Homo sapiens
MKKAEMGRFSISPDEDSSSYSSNSDFNYSYPTKQAALKSHYADVDPENQNFLLESNLGKKKYETEFHPGTTSFGMSVFNLSNAIVGSGILGLSYAMANTGIALFIILLTFVSIFSLYSVHLLLKTANEGGSLLYEQLGYKAFGLVGKLAASGSITMQNIGAMSSYLFIVKYELPLVIQALTNIEDKTGLWYLNGNYLVLLVSLVVILPLSLFRNLGYLGYTSGLSLLCMVFFLIVVICKKFQVPCPVEAALIINETINTTLTQPTALVPALSHNVTENDSCRPHYFIFNSQTVYAVPILIFSFVCHPAVLPIYEELKDRSRRRMMNVSKISFFAMFLMYLLAALFGYLTFYEHVESELLHTYSSILGTDILLLIVRLAVLMAVTLTVPVVIFPIRSSVTHLLCASKDFSWWRHSLITVSILAFTNLLVIFVPTIRDIFGFIGASAASMLIFILPSAFYIKLVKKEPMKSVQKIGALFFLLSGVLVMTGSMALIVLDWVHNAPGGGH

SEQ ID NO: 168 - protein, 614 aa, Homo sapiens
MSGIKKQKTENQQKSTNVVYQAHHVSRNKRGQVVGTRGGFRGCTVWLTGLSGAGKTTISFALEEYLVSHAIPCYSLDGDNVRHGLNRNLGFSPGDREENIRRIAEVAKLFADAGLVCITSFISPFAKDRENARKIHESAGLPFFEIFVDAPLNICESRDVKGLYKRARAGEIKGFTGIDSDYEKPETPERVLKTNLSTVSDCVHQVVELLQEQNIVPYTIIKDIHELFVPENKLDHVRAEAETLPSLSITKLDLQWVQVLSEGWATPLKGFMREKEYLQVMHFDTLLDDGVINMSIPIVLPVSAEDKTRLEGCSKFVLAHGGRRVAILRDAEFYEHRKEERCSRVWGTTCTKHPHIKMVMESGDWLVGGDLQVLEKIRWNDGLDQYRLTPLELKQKCKEMNADAVFAFQLRNPVHNGHALLMQDTCRRLLERGYKHPVLLLHPLGGWTKDDDVPLDWRMKQHAAVLEEGVLDPKSTIVAIFPSPMLYAGPTEVQWHCRSRMIAGANFYIVGRDPAGMPHPETKKDLYEPTHGGKVLSMAPGLTSVEIIPFRVAAYNKAKKAMDFYDPARHNEFDFISGTRMRKLAREGENPPDGFMAPKAWKVLTDYYRSLEKN

SEQ ID NO: 169 - protein, 1218 aa, Homo sapiens
MRSPRTRGRSGRPLSLLLALLCALRAKVCGASGQFELEILSMQNVNGELQNGNCCGGARNPGDRKCTRDECDTYFKVCLKEYQSRVTAGGPCSFGSGSTPVIGGNTFNLKASRGNDRNRIVLPFSFAWPRSYTLLVEAWDSSNDTVQPDSIIEKASHSGMINPSRQWQTLKQNTGVAHFEYQIRVTCDDYYYGFGCNKFCRPRDDFFGHYACDQNGNKTCMEGWMGPECNRAICRQGCSPKHGSCKLPGDCRCQYGWQGLYCDKCIPHPGCVHGICNEPWQCLCETNWGGQLCDKDLNYCGTHQPCLNGGTCSNTGPDKYQCSCPEGYSGPNCEIAEHACLSDPCHNRGSCKETSLGFECECSPGWTGPTCSTNIDDCSPNNCSHGGTCQDLVNGFKCVCPPQWTGKTCQLDANECEAKPCVNAKSCKNLIASYYCDCLPGWMGQNCDININDCLGQCQNDASCRDLVNGYRCICPPGYAGDHCERDIDECASNPCLNGGHCQNEINRFQCLCPTGFSGNLCQLDIDYCEPNPCQNGAQCYNRASDYFCKCPEDYEGKNCSHLKDHCRTTPCEVIDSCTVAMASNDTPEGVRYISSNVCGPHGKCKSQSGGKFTCDCNKGFTGTYCHENINDCESNPCRNGGTCIDGVNSYKCICSDGWEGAYCETNINDCSQNPCHNGGTCRDLVNDFYCDCKNGWKGKTCHSRDSQCDEATCNNGGTCYDEGDAFKCMCPGGWEGTTCNIARNSSCLPNPCHNGGTCVVNGESFTCVCKEGWEGPICAQNTNDCSPHPCYNSGTCVDGDNWYRCECAPGFAGPDCRININECQSSPCAFGATCVDEINGYRCVCPPGHSGAKCQEVSGRPCITMGSVIPDGAKWDDDCNTCQCLNGRIACSKVWCGPRPCLLHKGHSECPSGQSCIPILDDQCFVHPCTGVGECRSSSLQPVKTKCTSDSYYQDNCANITFTFNKEMMSPGLTTEHICSELRNLNILKNVSAEYSIYIACEPSPSANNEIHVAISAEDIRDDGNPIKEITDKIIDLVSKRDGNSSLIAAVAEVRVQRRPLKNRTDFLVPLLSSVLTVAWICCLVTAFYWCLRKRRKPGSHTHSASEDNTTNNVREQLNQIKNPIEKHGANTVPIKDYENKNSKMSKIRTHNSEVEEDDMDKHQQKARFAKQPAYTLVDREEKPPNGTPTKHPNWTNKQDNRDLESAQSLNRMEYIV

SEQ ID NO: 170 - protein, 84 aa, Homo sapiens
MPLARDLLHPSLEEEKKKHKKKRLVQSPNSYFMDVKCPGCYKITTVFSHAQTVVLCVGCSTVLCQPTGGKARLTEGCSFRRKQH

SEQ ID NO: 171 - protein, 974 aa, Homo sapiens [sequence omitted]

SEQ ID NO: 172 - protein, 750 aa, Homo sapiens
MSQWYELQQLDSKFLEQVHQLYDDSFPMEIRQYLAQWLEKQDWEHAANDVSFATIRFHDLLSQLDDQYSRFSLENNFLLQHNIRKSKRNLQDNFQEDPIQMSMIIYSCLKEERKILENAQRFNQAQSGNIQSTVMLDKQKELDSKVRNVKDKVMCIEHEIKSLEDLQDEYDFKCKTLQNREHETNGVAKSDQKQEQLLLKKMYLMLDNKRKEVVHKIIELLNVTELTQNALINDELVEWKRRQQSACIGGPPNACLDQLQNWFTIVAESLQQVRQQLKKLEELEQKYTYEHDPITKNKQVLWDRTFSLFQQLIQSSFVVERQPCMPTHPQRPLVLKTGVQFTVKLRLLVKLQELNYNLKVKVLFDKDVNERNTVKGFRKFNILGTHTKVMNMEESTNGSLAAEFRHLQLKEQKNAGTRTNEGPLIVTEELHSLSFETQLCQPGLVIDLETTSLPVVVISNVSQLPSGWASILWYNMLVAEPRNLSFFLTPPCARWAQLSEVLSWQFSSVTKRGLNVDQLNMLGEKLLGPNASPDGLIPWTRFCKENINDKNFPFWLWIESILELIKKHLLPLWNDGCIMGFISKERERALLKDQQPGTFLLRFSESSREGAITFTWVERSQNGGEPDFHAVEPYTKKELSAVTFPDIIRNYKVMAAENIPENPLKYLYPNIDKDHAFGKYYSRPKEAPEPMELDGPKGTGYIKTELISVSEVHPSRLQTTDNLLPMSPEEFDEVSRIVGSVEFDSMMNTV

SEQ ID NO: 173 - protein, 339 aa, Homo sapiens
MWQLWASLCCLLVLANARSRPSFHPLSDELVNYVNKRNTTWQAGHNFYNVDMSYLKRLCGTFLGGPKPPQRVMFTEDLKLPASFDAREQWPQCPTIKEIRDQGSCGSCWAFGAVEAISDRICIHTNAHVSVEVSAEDLLTCCGSMCGDGCNGGYPAEAWNFWTRKGLVSGGLYESHVGCRPYSIPPCEHHVNGSRPPCTGEGDTPKCSKICEPGYSPTYKQDKHYGYNSYSVSNSEKDIMAEIYKNGPVEGAFSVYSDFLLYKSGVYQHVTGEMMGGHAIRILGWGVENGTPYWLVANSWNTDWGDNGFFKILRGQDHCGIESEVVAGIPRTDQYWEKI

SEQ ID NO: 174 - protein, 67 aa, Homo sapiens
MIIPVRCFTCGKIVGNKWEAYLGLLQAEYTEGDALDALGLKRYCCRRMLLAHVDLIEKLLNYAPLEK

SEQ ID NO: 175 - protein, 477 aa, Homo sapiens
MDGFYDQQVPYMVTNSQRGRNCNEKPTNVRKRKFINRDLAHDSEELFQDLSQLQETWLAEAQVPDNDEQFVPDYQAESLAFHGLPLKIKKEPHSPCSEISSACSQEQPFKFSYGEKCLYNVSAYDQKPQVGMRPSNPPTPSSTPVSPLHHASPNSTHTPKPDRAFPAHLPPSQSIPDSSYPMDHRFRRQLSEPCNSFPPLPTMPREGRPMYQRQMSEPNIPFPPQGFKQEYHDPVYEHNTMVGSAASQSFPPPLMIKQEPRDFAYDSEVPSCHSIYMRQEGFLAHPSRTEGCMFEKGPRQFYDDTCVVPEKFDGDIKQEPGMYREGPTYQRRGSLQLWQFLVALLDDPSNSHFIAWTGRGMEFKLIEPEEVARRWGIQKNRPAMNYDKLSRSLRYYYEKGIMQKVAGERYVYKFVCDPEALFSMAFPDNQRPLLKTDMERHINEEDTVPLSHFDESMAYMPEGGCCNPHPYNEGYVY

SEQ ID NO: 176 - protein, 430 aa, Homo sapiens
MSFTTRSTFSTNYRSLGSVQAPSYGARPVSSAASVYAGAGGSGSRISVSRSTSFRGGMGSGGLATGIAGGLAGMGGIQNEKETMQSLNDRLASYLDRVRSLETENRRLESKIREHLEKKGPQVRDWSHYFKIIEDLRAQIFANTVDNARIVLQIDNARLAADDFRVKYETELAMRQSVENDIHGLRKVIDDTNITRLQLETEIEALKEELLFMKKNHEEEVKGLQAQIASSGLTVEVDAPKSQDLAKIMADIRAQYDELARKNREELDKYWSQQIEESTTVVTTQSAEVGAAETTLTELRRTVQSLEIDLDSMRNLKASLENSLREVEARYALQMEQLNGILLHLESELAQTRAEGQRQAQEYEALLNIKVKLEAEIATYRRLLEDGEDFNLGDALDSSNSMQTIQKTTTRRIVDGKVVSETNDTKVLRH

SEQ ID NO: 177 - protein, 159 aa, Homo sapiens [sequence omitted]

SEQ ID NO: 178 - protein, 843 aa, Homo sapiens
MGEPLTDSEKRKQISVRGLAGLGDVAEVRKSFNRHLHFTLVKDRNVATPRDYFFALAHTVRDHLVGRWIRTQQHYYERDPKRIYYLSLEFYMGRTLQNTMVNLGLQNACDEAIYQLGLDLEELEEIEEDAGLGNGGLGRLAACFLDSMATLGLAAYGYGIRYEFGIFNQKIVNGWQVEEADDWLRYGNPWEKARPEYMLPVHFYGRVEHTPDGVKWLDTQVVLAMPYDTPVPGYKNNTVNTMRLWSAKAPNDFKLQDFNVGDYIEAVLDRNLAENISRVLYPNDNFFEGKELRLKQEYFVVAATLQDIIRRFKSSKFGCRDPVRTCFETFPDKVAIQLNDTHPALSIPELMRILVDVEKVDWDKAWEITKKTCAYTNHTVLPEALERWPVSMFEKLLPRHLEIIYAINQRHLDHVAALFPGDVDRLRRMSVIEEGDCKRINMAHLCVIGSHAVNGVARIHSEIVKQSVFKDFYELEPEKFQNKTNGITPRRWLLLCNPGLADTIVEKIGEEFLTDLSQLKKLLPLVSDEVFIRDVAKVKQENKLKFSAFLEKEYKVKINPSSMFDVHVKRIHEYKRQLLNCLHVVTLYNRIKRDPAKAFVPRTVMIGGKAAPGYHMAKLIIKLVTSIGDVVNHDPVVGDRLKVIFLENYRVSLAEKVIPAADLSQQISTAGTEASGTGNMKFMLNGALTIGTMDGANVEMAEEAGAENLFIFGLRVEDVEALDRKGYNAREYYDHLPELKQAVDQISSGFFSPKEPDCFKDIVNMLMHHDRFKVFADYEAYMQCQAQVDQLYRNPKEWTKKVIRNIACSGKFSSDRTITEYAREIWGVEPSDLQIPPPNIPRD

SEQ ID NO: 179 - protein, 583 aa, Homo sapiens
MESKGASSCRLLFCLLISATVFRPGLGWYTVNSAYGDTIIIPCRLDVPQNLMFGKWKYEKPDGSPVFIAFRSSTKKSVQYDDVPEYKDRLNLSENYTLSISNARISDEKRFVCMLVTEDNVFEAPTIVKVFKQPSKPEIVSKALFLETEQLKKLGDCISEDSYPDGNITWYRNGKVLHPLEGAVVIIFKKEMDPVTQLYTMTSTLEYKTTKADIQMPFTCSVTYYGPSGQKTIHSEQAVFDIYYPTEQVTIQVLPPKNAIKEGDNITLKCLGNGNPPPEEFLFYLPGQPEGIRSSNTYTLMDVRRNATGDYKCSLIDKKSMIASTAITVHYLDLSLNPSGEVTRQIGDALPVSCTISASRNATVVWMKDNIRLRSSPSFSSLHYQDAGNYVCETALQEVEGLKKRESLTLIVEGKPQIKMTKKTDPSGLSKTIICHVEGFPKPAIQWTITGSGSVINQTEESPYINGRYYSKIIISPEENVTLTCTAENQLERTVNSLNVSAISIPEHDEADEISDENREKVNDQAKLIVGIVVGLLLAALVAGVVYWLYMKKSKTASKHVNKDLGNMEENKKLEENNHKTEA

SEQ ID NO: 180 - protein, 349 aa, Homo sapiens
MTAASMGPVRVAFVVLLALCSRPAVGQNCSGPCRCPDEPAPRCPAGVSLVLDGCGCCRVCAKQLGELCTERDPCDPHKGLFCDFGSPANRKIGVCTAKDGAPCIFGGTVYRSGESFQSSCKYQCTCLDGAVGCMPLCSMDVRLPSPDCPFPRRVKLPGKCCEEWVCDEPKDQTVVGPALAAYRLEDTFGPDPTMIRANCLVQTTEWSACSKTCGMGISTRVTNDNASCRLEKQSRLCMVRPCEADLEENIKKGKKCIRTPKISKPIKFELSGCTSMKTYRAKFCGVCTDGRCCTPHRTTTLPVEFKCPDGEVMKKNMMFIKTCACHYNCPGDNDIFESLYYRKMYGDMA

SEQ ID NO: 181 - protein, 212 aa, Homo sapiens
MLNKVLSRLGVAGQWRFVDVLGLEEESLGSVPAPACALLLLFPLTAQHENFRKKQIEELKGQEVSPKVYFMKQTIGNSCGTIGLIHAVANNQDKLGFEDGSVLKQFLSETEKMSPEDRAKCFEKNEAIQAAHDAVAQEGQCRVDDKVNFHFILFNNVDGHLYELDGRMPFPVNHGASSEDTLLKDAAKVCREFTEREQGEVRFSAVALCKAA

SEQ ID NO: 182 - protein, 4801 aa, Homo sapiens
MPPGMVSSLPLSRRLRHVYLLLFVCLSLHWAWFRGLGVSASWRAGLRGAGQSLGRWVYAAAADHTQGIGSHWPGGWAGRHWCRLDPTPWGKQVNANGADNAAACLSPLTATLSAVSGRQLQPGEPGAETEDDHSVTEGPADEGIRPRPQGSSPVYEYTTEAADFGLQEDAPGRQGSAGRRRSWWKRDSGDSRTFFRMSRPEAVQEATEVTLKTEVEAGASGYSVTGGGDQGIFVKQVLKDSSAAKLFNLREGDQLLSTTVFFENIKYEDALKILQYSEPYKVQFKIRRQLPAPQDEEWASSDAQHGPQGKEKEDTDVADGCRETPTKTLEGDGDQERLISKPRVGRGRQSQRERLSWPKFQSIKSKRGPGPQRSHSSSEAYEPRDAHDVSPTSTDTEAQLTVERQEQKAGPGSQRRRKFLNLRFRTGSGQGPSSTGQPGRGFQSGVGRAGVLEELGPWGDSLEETGAATGSRREERAEQDREVMPAQSMPLPTELGDPRLCEGTPQEGGLRAARLHGKTLEGQAQETAVAQRKPRAQPTPGMSREGEGEGLQSLEIGIARLSLRDTTEGGTQIGPPEIRVRVHDLKTPKFAFSTEKEPERERRLSTPQRGKRQDASSKAGTGLKGEEVEGAGWMPGREPTTHAEAQGDEGDGEEGLQRTRITEEQDKGREDTEGQIRMPKFKIPSLGWSPSKHTKTGREKATEDTEQGREGEATATADRREQRRTEEGLKDKEDSDSMTNTTKIQLIHDEKRLKKEQILTEKEVATKDSKFKMPKFKMPLFGASAPGKSMEASVDVSAPKVEADVSLLSMQGDLKTTDLSVQTPSADLEVQDGQVDVKLPEGPLPEGASLKGHLPKVQRPSLKMPKVDLKGPKLDLKGPKAEVTAPDVKMSLSSMEVDVQAPRAKLDGARLEGDLSLADKEVTAKDSKFKMPKFKMPSFGVSAPGKSMEDSVDVSAPKVEADVSLSSMQGDLKATDLSIQPPSADLEVQAGQVDVKLPEGPVPEGAGPKVHLPKVEMPSFKMPKVDLKGPQIDVKGPKLDLKGPKAEVTAPDGEVSLPSMEVDVQAQKAKLDGAWLEGDLSLADKDVTAKDSKFKMPKFKMPSFGVSAPGKSIKALVDVSAPKVEADLSLPSMQGDLKTTDLSIQPASTDLKVQADQVDVKLPEGHLPEGAGLKGHLPKVEMPSFKMPKVALKGPQVDVKGPKLDLKSPKAEVTAPDVEVSLPSVEVDVEAPGAKLDSARLEGELSLADKDVTAKDSRFKMPKFKMPSFGASAPGKSIEASVDVSAPKVEADVDVKLLEGHVPEGAGFKGHLPKVQMPSLKMPKVDLKGPQVEVRGPKLDLKGHKAEVTAHEVAVSLPSVEVDMQAPGAKLDGAQLDGDLSLADKDVTAKDSKFKMPKFKMPSFGVSAPGKSIEASVDLSAPKVEADMSLPSMQGDLKTTDLSIQPPSTDLELQAGQLDVKLPEGPVPEGAGLKGHLPKLQMPSFKVPKVDLKGPEIDIKGPKLDLKDPKVEVTAPDVEVSLPSVEVDVEAPGAKLDGGRLEEDMSLADKDLTTKDSKFKMPKFKMPSFGVSAPGKSIEASVDVSAPKVEADVSLPSMQGDLKATDLSIQPPSADLEVQAGQVDVKLPEGPVSEGAGLKGHLPKVQMPSFKMPKVDLKGPQIDVKGPKLDLKGPKVEVTAPDVKMSLSSMEVDVQAPRAKLDGAQLEGDLSLADKAVTAKDSKFKMPKFKMPSFGVSAPGKSIEASVDVSEPKVEADVSLPSMQGDLKTTDLSIQSPSADLEVQAGQVNVKLPEGPLPEGAGFKGHLPKVQMPSLKMPKVALKGPQMDVKGPKLDLKGPKAEVMAPDVEVSLPSVEVDVEAPGAKLDSVRLEGDLSLADKDVTAKDSKFKMPKFKMPSFGVSAPGKSIEASVDVSAPKVEAEVSLPSMQGDLKTTDLCIPLPSADLVVQAGQVDMKLPEGQVPEGAGLKGHLPKVDMPSFKMPKVDLKGPQTDVKGAKLDLKGPKAEVTAPDVEVSLPSMEVDVQAQKAKLDGARLEGDLSLADKDMTAKDSKFKMPKFKMPSFGVSAPGRSIEASVDVPAPKVEADVSLPSMQGDLKTTDLSIQPPSADLKVQTGQVDVKLPEGHVPEGAGLKGHLPKVEMPSLKMPKVDLKGPQVDIKGPKLDLKDPKVEMRVPDVEVSLPSMEVDVQAPRAKLDSAHLQGDLTLANKDLTTKDSKFKMPKFKMPSFGVSAPGKSIEASVDVSPPKVEADMSLPSMQGDLKTTDLSIQPLSADVKVQAGQVDVKLLEGPVPEEVGLKGHLPKLQMPSFKVPKVDLKGPEIDIKGPKLDLKDPKVEVTAPDVEVSLPSVEVDVKAPGAKLDGARLEGDMSLADKDVTAKDSKFKMPKFKMLSFGVSALGKSIEASADVSALKVEADVSLPSMQGDLKTTDLSVQPPSADLEVQAGQVDVKLPEGPVPEGAGLKGHLPKLQMPSFKMPKVDLKGPQIDVKGPKLDLKGPKTDVMAPDVEVSQPSVEVDVEAPGAKLDGAWLEGDLSVADKDVTTKDSRFKIPKFKMPSFGVSAPGKSIEASVDVSAPKVEADGSLSSMQGDLKATDLSIQPPSADLEVQAGQVDVKLPEGPVPEGAGLKGHLPKVQMPSFKMPEMDLKGPQLDVKGPKLDLKGPKAEVTAPDVEMSLSSMEVDVQAPRAKLDGARLEGDLSLADKGVTAKDSKFKMPKFKMPSFRVSAPGESIEALVDVSELKVEADMSLPSMQGDLKTTDISIQPPSAQLEVQAGQVDVKLPEGHVPEGAGLKGHLPKLQMPSFKMPEVDLKGPQIDVKGPNVDLKGPKAEVTAPDVKMSLSSMEVDVQAPRAKLDGARLEGDLSLADKGMTAKDSKFKMPKFKMPSFGVSAPGKSIEASVDVSELKVEADGSFPSMQGDLKTTDIRIQPPSAQLEVQAGQVDVKLPEGHVPEGAGLKGHLPKVQMPSFKMPKVDLKGPQIDVKGPKLDLKGPKAEVTAPDVEVSLPSVEVDVEAPRAKLDGARLEGDLSLADKDVTAKDSKFKMPKFKMPSFGVSAPGKSIEVSVDVSAPKVEAEVSLPSMQGDLKTTDISIEPPSAQLEVQAGQVDLKLPEGHVPEGAGLKGHLPKLQMPSFKMPKVDRKGPQIDVKGPKLDLKGPKTDVTAPDVEVSQPGMEVDVEAPGAKLDGARLEGDLSLADKDVTAKDSKFKMPKFKMPSFGVSAPGKSIEVLVDVSAPKVEADLSLPSMQGDLKNTDISIEPPSAQLEVQAGQVDVKLPEGHVLEGAGLKGHLPKLQMPSFKMPKVDRKGPQIDIKGPKLDLKGPKMDVTAPDVEVSQPSMEVDVEAPGAKLDGARLEGDLSLADKDVTAKDSKFKMPKFKMPSYRASAPGKSIQASVDVSAPKAEADVSLPSMQGDLKTTDLSIQLPSVDLEVQAGQVDVKLPEGHVPEGAGLKGHLPKVEMPSFKMPKVDLKSPQVDIKGPKLDLKVPKAEVTVPDVEVSLPSVEVDVQAPRAKLDGARLEGDLSLAEKDVTAKDSKFKMPKFKMPSFGVSAPGRSIEASLDVSAPKVEADVSLSSMQGDLKATDLSIQPPSADLEVQAVQVDVELLEGPVPEGAGLKGHLPKVEMPSLKTPKVDLKGPQIDVKGPKLDLKGPKAEVRVPDVEVSLPSVEVDVQAPKAKLDAGRLEGDLSLADKDVTAKDSKFKMPKFKMPSFRVSAPGKSMEASVDVSAPKVEADVSLPSMQGDLKTTDLSIQPPSADLKVQAGQMDVKLPEGQVPEGAGLKEHLPKVEMPSLKMPKVDLKGPQVDIKGPKLDLKVSKAEVTAPDVEVSLPSVEVDVQAPRAKLDSAQLEGDLSLADKDVTAKDSKFKMPKFKMPSFGVSAPGKSIEASVHVSAPKVEADVSLPSMQGDLKTTDLSIQPHSADLTVQARQVDMKLLEGHVPEEAGLKGHLPKVQMPSFKMPKVDLKGPEIDIKGPKLDLKDPKVEVTAPDVEVSLPSVEVDVEAPGAKLDGARLEGDLSLADKDMTAKDSKFKMPKFKMPSFGVSAPGKSMEASVDVTAPKVEADVSLPSMQGDLKATDLSVQPPSADLEVQAGQVDVKLPEGPVPEGASLKGHLPKVQMPSFKMPKVDLKGPQIDVKGPKLDLKGPKAEVTAPDVKMSLSSMEVDVQAPRAKLDGVQLEGDLSLADKDVTAKDSKFKMPKFKMPSFGVSAPGKSMEASVDVSELKAKADVSLPSMQGDLKTTDLSIQSPSADLEVQAGQVDVKLPEGPLPKGAGLKGHLPKVQMPCLKMPKVALKGPQVDVKGPKLDLKGPKADVMTPVVEVSLPSMEVDVEAPGAKLDSVRLEGDLSLADKDMTAKDSKFKMPKFKMPSFGVSAPGKSIEASLDVSALKVEADVSLPSMQGDLKTTHLSIQPPSADLEVQAGQEDVKLPEGPVHEGAGLKGHLPKLQMPSFKVPKVDLKGPQIDVNVPKLDLKGPKVEVTSPNLDVSLPSMEVDIQAPGAKLDSTRLEGDLSLADKDVTAKDSKFKMPKFKMPSFGMLSPGKSIEVSVDVSAPKMEADMSIPSMQGDLKTTDLRIQAPSADLEVQAGQVDLKLPEGHMPEVAGLKGHLPKVEMPSFKMPKVDLKGPQVDVKGPKLDLKGPKAEVMAPDVEVSLPSVETDVQAPGSMLDGARLEGDLSLAHEDVAGKDSKFQGPKLSTSGFEWSSKKVSMSSSEIEGNVTFHEKTSTFPIVESVVHEGDLHDPSRDGNLGLAVGEVGMDSKFKKLHFKVPKVSFSSTKTPKDSLVPGFGLFRAIHADA

SEQ ID NO: 183 - protein, 491 aa, Homo sapiens [sequence omitted]

SEQ ID NO: 184 - protein, 73 aa, Homo sapiens
MPALHIEDLPEKEKLKMEVEQLRKEVKLQRQQVSKCSEEIKNYIEERSGEDPLVKGIPEDKNPFKEKGSCVIS

SEQ ID NO: 185 - protein, 398 aa, Homo sapiens
MNWHLPLFLLASVTLPSICSHFNPLSLEELGSNTGIQVFNQIVKSRPHDNIVISPHGIASVLGMLQLGADGRTKKQLAMVMRYGVNGVGKILKKINKAIVSKKNKDIVTVANAVFVKNASEIEVPFVTRNKDVFQCEVRNVNFEDPASACDSINAWVKNETRDMIDNLLSPDLIDGVLTRLVLVNAVYFKGLWKSRFQPENTKKRTFVAADGKSYQVPMLAQLSVFRCGSTSAPNDLWYNFIELPYHGESISMLIALPTESSTPLSAIIPHISTKTIDSWMSIMVPKRVQVILPKFTAVAQTDLKEPLKVLGITDMFDSSKANFAKITTGSENLHVSHILQKAKIEVSEDGTKASAATTAILIARSSPPWFIVDRPFLFFIRHNPTGAVLFMGQINKP

SEQ ID NO: 186 - protein, 180 aa, Homo sapiens
MAPGVARGPTPYWRLRLGGAALLLLLIPVAAAQEPPGAACSQNTNKTCEECLKNVSCLWCNTNKACLDYPVTSVLPPASLCKLSSARWGVCWVNFEALIITMSVVGGTLLLGIAICCCCCCRRKRSRKPDRSEEKAMREREERRIRQEERRAEMKTRHDEIRKKYGLFKEENPYARFENN

SEQ ID NO: 187 - protein, 400 aa, Homo sapiens
MTSYSYRQSSATSSFGGLGGGSVRFGPGVAFRAPSIHGGSGGRGVSVSSARFVSSSSSGGYGGGYGGVLTASDGLLAGNEKLTMQNLNDRLASYLDKVRALEAANGELEVKIRDWYQKQGPGPSRDYSHYYTTIQDLRDKILGATIENSRIVLQIDNARLAADDFRTKFETEQALRMSVEADINGLRRVLDELTLARTDLEMQIEGLKEELAYLKKNHEEEISTLRGQVGGQVSVEVDSAPGTDLAKILSDMRSQYEVMAEQNRKDAEAWFTSRTEELNREVAGHTEQLQMSRSEVTDLRRTLQGLEIELQSQLSMKAALEDTLAETEARFGAQLAHIQALISGIEAQLADVRADSERQNQEYQRLMDIKSRLEQEIATYRSLLEGQEDHYNNLSASKVL

SEQ ID NO: 188 - protein, 248 aa, Homo sapiens [sequence omitted]

SEQ ID NO: 189 - protein, 532 aa, Homo sapiens
MAPSSPRPALPALLVLLGALFPGPGNAQTSVSPSKVILPRGGSVLVTCSTSCDQPKLLGIETPLPKKELLLPGNNRKVYELSNVQEDSQPMCYSNCPDGQSTAKTFLTVYWTPERVELAPLPSWQPVGKNLTLRCQVEGGAPRANLTVVLLRGEKELKREPAVGEPAEVTTTVLVRRDHHGANFSCRTELDLRPQGLELFENTSAPYQLQTFVLPATPPQLVSPRVLEVDTQGTVVCSLDGLFPVSEAQVHLALGDQRLNPTVTYGNDSFSAKASVSVTAEDEGTQRLTCAVILGNQSQETLQTVTIYSFPAPNVILTKPEVSEGTEVTVKCEAHPRAKVTLNGVPAQPLGPRAQLLLKATPEDNGRSFSCSATLEVAGQLIHKNQTRELRVLYGPRLDERDCPGNWTWPENSQQTPMCQAWGNPLPELKCLKDGTFPLPIGESVTVTRDLEGTYLCRARSTQGEVTREVTVNVLSPRYEIVIITVVAAAVIMGTAGLSTYLYNRQRKIKKYRLQQAQKGTPMKPNTQATPP

SEQ ID NO: 190 - protein, 635 aa, Homo sapiens
MAKKSAENGIYSVSGDEKKGPLIAPGPDGAPAKGDGPVGLGTPGGRLAVPPRETWTRQMDFIMSCVGFAVGLGNVWRFPYLCYKNGGGVFLIPYVLIALVGGIPIFFLEISLGQFMKAGSINVWNICPLFKGLGYASMVIVFYCNTYYIMVLAWGFYYLVKSFTTTLPWATCGHTWNTPDCVEIFRHEDCANASLANLTCDQLADRRSPVIEFWENKVLRLSGGLEVPGALNWEVTLCLLACWVLVYFCVWKGVKSTGKIVYFTATFPYVVLVVLLVRGVLLPGALDGIIYYLKPDWSKLGSPQVWIDAGTQIFFSYAIGLGALTALGSYNRFNNNCYKDAIILALINSGTSFFAGFVVFSILGFMAAEQGVHISKVAESGPGLAFIAYPRAVTLMPVAPLWAALFFFMLLLLGLDSQFVGVEGFITGLLDLLPASYYFRFQREISVALCCALCFVIDLSMVTDGGMYVFQLFDYYSASGTTLLWQAFWECVVVAWVYGADRFMDDIACMIGYRPCPWMKWCWSFFTPLVCMGIFIFNVVYYEPLVYNNTYVYPWWGEAMGWAFALSSMLCVPLHLLGCLLRAKGTMAERWQHLTQPIWGLHHLEYRAQDADVRGLTTLTPVSESSKVVVVESVM

SEQ ID NO: 191 - protein, 99 aa, Homo sapiens
MTSKLAVALLAAFLISAALCEGAVLPRSAKELRCQCIKTYSKPFHPKFIKELRVIESGPHCANTEIIVKLSDGRELCLDPKENWVQRVVEKFLKRAENS

SEQ ID NO: 192 - protein, 3396 aa, Homo sapiens
MFINIKSILWMCSTLIVTHALHKVKVGKSPPVRGSLSGKVSLPCHFSTMPTLPPSYNTSEFLRIKWSKIEVDKNGKDLKETTVLVAQNGNIKIGQDYKGRVSVPTHPEAVGDASLTVVKLLASDAGLYRCDVMYGIEDTQDTVSLTVDGVVFHYRAATSRYTLNFEAAQKACLDVGAVIATPEQLFAAYEDGFEQCDAGWLADQTVRYPIRAPRVGCYGDKMGKAGVRTYGFRSPQETYDVYCYVDHLDGDVFHLTVPSKFTFEEAAKECENQDARLATVGELQAAWRNGFDQCDYGWLSDASVRHPVTVARAQCGGGLLGVRTLYRFENQTGFPPPDSRFDAYCFKPKEATTIDLSILAETASPSLSKEPQMVSDRTTPIIPLVDELPVIPTEFPPVGNIVSFEQKATVQPQAITDSLATKLPTPTGSTKKPWDMDDYSPSASGPLGKLDISEIKEEVLQSTTGVSHYATDSWDGVVEDKQTQESVTQIEQIEVGPLVTSMEILKHIPSKEFPVTETPLVTARMILESKTEKKMVSTVSELVTTGHYGFTLGEEDDEDRTLTVGSDESTLIFDQIPEVITVSKTSEDTIHTHLEDLESVSASTTVSPLIMPDNNGSSMDDWEERQTSGRITEEFLGKYLSTTPFPSQHRTEIELFPYSGDKILVEGISTVIYPSLQTEMTHRRERTETLIPEMRTDTYTDEIQEEITKSPFMGKTEEEVFSGMKLSTSLSEPIHVTESSVEMTKSFDFPTLITKLSAEPTEVRDMEEDFTATPGTTKYDENITTVLLAHGTLSVEAATVSKWSWDEDNTTSKPLESTEPSASSKLPPALLTTVGMNGKDKDIPSFTEDGADEFTLIPDSTQKQLEEVTDEDIAAHGKFTIRFQPTTSTGIAEKSTLRDSTTEEKVPPITSTEGQVYATMEGSALGEVEDVDLSKPVSTVPQFAHTSEVEGLAFVSYSSTQEPTTYVDSSHTIPLSVIPKTDWGVLVPSVPSEDEVLGEPSQDILVIDQTRLEATISPETMRTTKITEGTTQEEFPWKEQTAEKPVPALSSTAWTPKEAVTPLDEQEGDGSAYTVSEDELLTGSERVPVLETTPVGKIDHSVSYPPGAVTEHKVKTDEVVTLTPRIGPKVSLSPGPEQKYETEGSSTTGFTSSLSPFSTHITQLMEETTTEKTSLEDIDLGSGLFEKPKATELIEFSTIKVTVPSDITTAFSSVDRLHTTSAFKPSSAITKKPPLIDREPGEETTSDMVIIGESTSHVPPTTLEDIVAKETETDIDREYFTTSSPPATQPTRPPTVEDKEAFGPQALSTPQPPASTKFHPDINVYIIEVRENKTGRMSDLSVIGHPIDSESKEDEPCSEETDPVHDLMAEILPEFPDIIEIDLYHSEENEEEEEECANATDVTTTPSVQYINGKHLVTTVPKDPEAAEARRGQFESVAPSQNFSDSSESDTHPFVIAKTELSTAVQPNESTETTESLEVTWKPETYPETSEHFSGGEPDVFPTVPFHEEFESGTAKKGAESVTERDTEVGHQAHEHTEPVSLFPEESSGEIAIDQESQKIAFARATEVTFGEEVEKSTSVTYTPTIVPSSASAYVSEEEAVTLIGNPWPDDLLSTKESWVEATPRQVVELSGSSSIPITEGSGEAEEDEDTMFTMVTDLSQRNTTDTLITLDTSRIITESFFEVPATTIYPVSEQPSAKVVPTKFVSETDTSEWISSTTVEEKKRKEEEGTTGTASTFEVYSSTQRSDQLILPFELESPNVATSSDSGTRKSFMSLTTPTQSEREMTDSTPVFTETNTLENLGAQTTEHSSIHQPGVQEGLTTLPRSPASVFMEQGSGEAAADPETTTVSSFSLNVEYAIQAEKEVAGTLSPHVETTFSTEPTGLVLSTVMDRVVAENITQTSREIVISERLGEPNYGAEIRGFSTGFPLEEDFSGDFREYSTVSHPIAKEETVMMEGSGDAAFRDTQTSPSTVPTSVHISHISDSEGPSSTMVSTSAFPWEEFTSSAEGSGEQLVTVSSSVVPVLPSAVQKFSGTASSIIDEGLGEVGTVNEIDRRSTILPTAEVEGTKAPVEKEEVKVSGTVSTNFPQTIEPAKLWSRQEVNPVRQEIESETTSEEQIQEEKSFESPQNSPATEQTIFDSQTFTETELKTTDYSVLTTKKTYSDDKEMKEEDTSLVNMSTPDPDANGLESYTTLPEATEKSHFFLATALVTESIPAEHVVTDSPIKKEESTKHFPKGMRPTIQESDTELLFSGLGSGEEVLPTLPTESVNFTEVEQINNTLYPHTSQVESTSSDKIEDFNRMENVAKEVGPLVSQTDIFEGSGSVTSTTLIEILSDTGAEGPTVAPLPFSTDIGHPQNQTVRWAEEIQTSRPQTITEQDSNKNSSTAEINETTTSSTDFLARAYGFEMAKEFVTSAPKPSDLYYEPSGEGSGEVDIVDSFHTSATTQATRQESSTTFVSDGSLEKHPEVPSAKAVTADGFPTVSVMLPLHSEQNKSSPDPTSTLSNTVSYERSTDGSFQDRFREFEDSTLKPNRKKPTENIIIDLDKEDKDLILTITESTILEILPELTSDKNTIIDIDHTKPVYEDILGMQTDIDTEVPSEPHDSNDESNDDSTQVQEIYEAAVNLSLTEETFEGSADVLASYTQATHDESMTYEDRSQLDHMGFHFTTGIPAPSTETELDVLLPTATSLPIPRKSATVIPEIEGIKAEAKALDDMFESSTLSDGQAIADQSEIIPTLGQFERTQEEYEDKKHAGPSFQPEFSSGAEEALVDHTPYLSIATTHLMDQSVTEVPDVMEGSNPPYYTDTTLAVSTFAKLSSQTPSSPLTIYSGSEASGHTEIPQPSALPGIDVGSSVMSPQDSFKEIHVNIEATFKPSSEEYLHITEPPSLSPDTKLEPSEDDGKPELLEEMEASPTELIAVEGTEILQDFQNKTDGQVSGEAIKMFPTIKTPEAGTVITTADEIELEGATQWPHSTSASATYGVEAGVVPWLSPQTSERPTLSSSPEINPETQAALIRGQDSTIAASEQQVAARILDSNDQATVNPVEFNTEVATPPFSLLETSNETDFLIGINEESVEGTAIYLPGPDRCKMNPCLNGGTCYPTETSYVCTCVPGYSGDQCELDFDECHSNPCRNGATCVDGFNTFRCLCLPSYVGALCEQDTETCDYGWHKFQGQCYKYFAHRRTWDAAERECRLQGAHLTSILSHEEQMFVNRVGHDYQWIGLNDKMFEHDFRWTDGSTLQYENWRPNQPDSFFSAGEDCVVIIWHENGQWNDVPCNYHLTYTCKKGTVACGQPPVVENAKTFGKMKPRYEINSLIRYHCKDGFIQRHLPTIRCLGNGRWAIPKITCMNPSAYQRTYSMKYFKNSSSAKDNSINTSKHDHRWSRRWQESRR

SEQ ID NO: 193 - protein, 463 aa, Homo sapiens
MGAGPSLLLAALLLLLSGDGAVRCDTPANCTYLDLLGTWVFQVGSSGSQRDVNCSVMGPQEKKVVVYLQKLDTAYDDLGNSGHFTIIYNQGFEIVLNDYKWFAFFKYKEEGSKVTTYCNETMTGWVHDVLGRNWACFTGKKVGTASENVYVNTAHLKNSQEKYSNRLYKYDHNFVKAINAIQKSWTATTYMEYETLTLGDMIRRSGGHSRKIPRPKPAPLTAEIQQKILHLPTSWDWRNVHGINFVSPVRNQASCGSCYSFASMGMLEARIRILTNNSQTPILSPQEVVSCSQYAQGCEGGFPYLIAGKYAQDFGLVEEACFPYTGTDSPCKMKEDCFRYYSSEYHYVGGFYGGCNEALMKLELVHHGPMAVAFEVYDDFLHYKKGIYHHTGLRDPFNPFELTNHAVLLVGYGTDSASGMDYWIVKNSWGTGWGENGYFRIRRGTDECAIESIAVAATPIPKL

SEQ ID NO: 194 - protein, 146 aa, Homo sapiens; identical to SEQ ID NO: 149

SEQ ID NO: 195 - protein, 483 aa, Homo sapiens
MSIRVTQKSYKVSTSGPRAFSSRSYTSGPGSRISSSSFSRVGSSNFRGGLGGGYGGASGMGGITAVTVNQSLLSPLVLEVDPNIQAVRTQEKEQIKTLNNKFASFIDKVRFLEQQNKMLETKWSLLQQQKTARSNMDNMFESYINNLRRQLETLGQEKLKLEAELGNMQGLVEDFKNKYEDEINKRTEMENEFVLIKKDVDEAYMNKVELESRLEGLTDEINFLRQLYEEEIRELQSQISDTSVVLSMDNSRSLDMDSIIAEVKAQYEDIANRSRAEAESMYQIKYEELQSLAGKHGDDLRRTKTEISEMNRNISRLQAEIEGLKGQRASLEAAIADAEQRGELAIKDANAKLSELEAALQRAKQDMARQLREYQELMNVKLALDIEIATYRKLLEGEESRLESGMQNMSIHTKTTSGYAGGLSSAYGGLTSPGLSYSLGSSFGSGAGSSSFSRTSSSRAVVVKKIETRDGKLVSESSDVLPK

SEQ ID NO: 196 - protein, 494 aa, Homo sapiens
MFEIKKICCIGAGYVGGPTCSVIAHMCPEIRVTVVDVNESRINAWNSPTLPIYEPGLKEVVESCRGKNLFFSTNIDDAIKEADLVFISVNTPTKTYGMGKGRAADLKYIEACARRIVQNSNGYKIVTEKSTVPVRAAESIRRIFDANTKPNLNLQVLSNPEFLAEGTAIKDLKNPDRVLIGGDETPEGQRAVQALCAVYEHWVPREKILTTNTWSSELSKLAANAFLAQRISSINSISALCEATGADVEEVATAIGMDQRIGNKFLKASVGFGGSCFQKDVLNLVYLCEALNLPEVARYWQQVIDMNDYQRRRFASRIIDSLFNTVTDKKIAILGFAFKKDTGDTRESSSIYISKYLMDEGAHLHIYDPKVPREQIVVDLSHPGVSEDDQVSRLVTISKDPYEACDGAHAVVICTEWDMFKELDYERIHKKMLKPAFIFDGRRVLDGLHNELQTIGFQIETIGKKVSSKRIPYAPSGEIPKFSLQDPPNKKPKV

SEQ ID NO: 197 - protein, 391 aa, Homo sapiens
MVMFKKIKSFEVVFNDPEKVYGSGERVAGRVIVEVCEVTRVKAVRILACGVAKVLWMQGSQQCKQTSEYLRYEDTLLLEDQPTGENEMVIMRPGNKYEYKFGFELPQGPLGTSFKGKYGCVDYWVKAFLDRPSQPTQETKKNFEVVDLVDVNTPDLMAPVSAKKEKKVSCMFIPDGRVSVSARIDRKGFCEGDEISIHADFENTCSRIVVPKAAIVARHTYLANGQTKVLTQKLSSVRGNHIISGTCASWRGKSLRVQKIRPSILGCNILRVEYSLLIYVSVPGSKKVILDLPLVIGSRSGLSSRTSSMASRTSSEMSWVDLNIPDTPEAPPCYMDVIPEDHRLESPTTPLLDDMDGSQDSPIFMYAPEFKFMPPPTYTEVDPCILNNNVQ

SEQ ID NO: 198 - protein, 339 aa, Homo sapiens; identical to SEQ ID NO: 173

SEQ ID NO: 199 - protein, 3396 aa, Homo sapiens; identical to SEQ ID NO: 192

SEQ ID NO: 200 - protein, 324 aa, Homo sapiens
MFCGDYVQGTIFPAPNFNPIMDAQMLGGALQGFDCDKDMLINILTQRCNAQRMMIAEAYQSMYGRDLIGDLREQLSDHFKDVMAGLMYPPPLYDAHELWHAMKGVGTDENCLIEILASRTNGEIFQMREAYCLQYSNNLQEDIYSETSGHFRDTLMNLVQGTREEGYSDPAMAAQDAMVLWEACQQKTGGHKTMLQMILCNKSYQQLRLVFQEFQNISGQDMVDAINECYDGYFQELLVAIVLCVRDKPAYFAYRLYSAIHDFGFHNKTVIRILIARSEIDLLTIRKRYKERYGKSLFHDIRNFASGHYKKALLAICAGDAEDY

SEQ ID NO: 201 - protein, 171 aa, Homo sapiens
MAKFVIRPATAADCSDILRLIKELAKYEYMEEQVILTEKDLLEDGFGEHPFYHCLVAEVPKEHWTPEGHSIVGFAMYYFTYDPWIGKLLYLEDFFVMSDYRGFGIGSEILKNLSQVAMRCRCSSMHFLVAEWNEPSINFYKRRGASDLSSEEGWRLFKIDKEYLLKMATEE

SEQ ID NO: 202 - protein, 3176 aa, Homo sapiens
MRKHRHLPLVAVFCLFLSGFPTTHAQQQQADVKNGAAADIIFLVDSSWTIGEEHFQLVREFLYDVVKSLAVGENDFHFALVQFNGNPHTEFLLNTYRTKQEVLSHISNMSYIGGTNQTGKGLEYIMQSHLTKAAGSRAGDGVPQVIVVLTDGHSKDGLALPSAELKSADVNVFAIGVEDADEGALKEIASEPLNMHMFNLENFTSLHDIVGNLVSCVHSSVSPERAGDTETLKDITAQDSADIIFLIDGSNNTGSVNFAVILDFLVNLLEKLPIGTQQIRVGVVQFSDEPRTMFSLDTYSTKAQVLGAVKALGFAGGELANIGLALDFVVENHFTRAGGSRVEEGVPQVLVLISAGPSSDEIRYGVVALKQASVFSFGLGAQAASRAELQHIATDDNLVFTVPEFRSFGDLQEKLLPYIVGVAQRHIVLKPPTIVTQVIEVNKRDIVFLVDGSSALGLANFNAIRDFIAKVIQRLEIGQDLIQVAVAQYADTVRPEFYFNTHPTKREVITAVRKMKPLDGSALYTGSALDFVRNNLFTSSAGYRAAEGIPKLLVLITGGKSLDEISQPAQELKRSSIMAFAIGNKGADQAELEEIAFDSSLVFIPAEFRAAPLQGMLPGLLAPLRTLSGTPEVHSNKRDIIFLLDGSANVGKTNFPYVRDFVMNLVNSLDIGNDNIRVGLVQFSDTPVTEFSLNTYQTKSDILGHLRQLQLQGGSGLNTGSALSYVYANHFTEAGGSRIREHVPQLLLLLTAGQSEDSYLQAANALTRAGILTFCVGASQANKAELEQIAFNPSLVYLMDDFSSLPALPQQLIQPLTTYVSGGVEEVPLAQPESKRDILFLFDGSANLVGQFPVVRDFLYKIIDELNVKPEGTRIAVAQYSDDVKVESRFDEHQSKPEILNLVKRMKIKTGKALNLGYALDYAQRYIFVKSAGSRIEDGVLQFLVLLVAGRSSDRVDGPASNLKQSGVVPFIFQAKNADPAELEQIVLSPAFILAAESLPKIGDLHPQIVNLLKSVHNGAPAPVSGEKDVVFLLDGSEGVRSGFPLLKEFVQRVVESLDVGQDRVRVAVVQYSDRTRPEFYLNSYMNKQDVVNAVRQLTLLGGPTPNTGAALEFVLRNILVSSAGSRITEGVPQLLIVLTADRSGDDVRNPSVVVKRGGAVPIGIGIGNADITEMQTISFIPDFAVAIPTFRQLGTVQQVISERVTQLTREELSRLQPVLQPLPSPGVGGKRDVVFLIDGSQSAGPEFQYVRTLIERLVDYLDVGFDTTRVAVIQFSDDPKAEFLLNAHSSKDEVQNAVQRLRPKGGRQINVGNALEYVSRNIFKRPLGSRIEEGVPQFLVLISSGKSDDEVVVPAVELKQFGVAPFTIARNADQEELVKISLSPEYVFSVSTFRELPSLEQKLLTPITTLTSEQIQKLLASTRYPPPAVESDAADIVFLIDSSEGVRPDGFAHIRDFVSRIVRRLNIGPSKVRVGVVQFSNDVFPEFYLKTYRSQAPVLDAIRRLRLRGGSPLNTGKALEFVARNLFVKSAGSRIEDGVPQHLVLVLGGKSQDDVSRFAQVIRSSGIVSLGVGDRNIDRTELQTITNDPRLVFTVREFRELPNIEERIMNSFGPSAATPAPPGVDTPPPSRPEKKKADIVFLLDGSINFRRDSFQEVLRFVSEIVDTVYEDGDSIQVGLVQYNSDPTDEFFLKDFSTKRQIIDAINKVVYKGGRHANTKVGLEHLRVNHFVPEAGSRLDQRVPQIAFVITGGKSVEDAQDVSLALTQRGVKVFAVGVRNIDSEEVGKIASNSATAFRVGNVQELSELSEQVLETLHDAMHETLCPGVTDAAKACNLDVILGFDGSRDQNVFVAQKGFESKVDAILNRISQMHRVSCSGGRSPTVRVSVVANTPSGPVEAFDFDEYQPEMLEKFRNMRSQHPYVLTEDTLKVYLNKFRQSSPDSVKVVIHFTDGADGDLADLHRASENLRQEGVRALILVGLERVVNLERLMHLEFGRGFMYDRPLRLNLLDLDYELAEQLDNIAEKACCGVPCKCSGQRGDRGPIGSIGPKGIPGEDGYRGYPGDEGGPGERGPPGVNGTQGFQGCPGQRGVKGSRGFPGEKGEVGEIGLDGLDGEDGDKGLPGSSGEKGNPGRRGDKGPRGEKGERGDVGIRGDPGNPGQDSQERGPKGETGDLGPMGVPGRDGVPGGPGETGKNGGFGRRGPPGAKGNKGGPGQPGFEGEQGTRGAQGPAGPAGPPGLIGEQGISGPRGSGGARGAPGERGRTGPLGRKGEPGEPGPKGGIGNPGPRGETGDDGRDGVGSEGRRGKKGERGFPGYPGPKGNPGEPGLNGTTGPKGIRGRRGNSGPPGIVGQKGRPGYPGPAGPRGNRGDSIDQCALIQSIKDKCPCCYGPLECPVFPTELAFALDTSEGVNQDTFGRMRDVVLSIVNVLTIAESNCPTGARVAVVTYNNEVTTEIRFADSKRKSVLLDKIKNLQVALTSKQQSLETAMSFVARNTFKRVRNGFLMRKVAVFFSNTPTRASPQLREAVLKLSDAGITPLFLTRQEDRQLINALQINNTAVGHALVLPAGRDLTDFLENVLTCHVCLDICNIDPSCGFGSWRPSFRDRRAAGSDVDIDMAFILDSAETTTLFQFNEMKKYIAYLVRQLDMSPDPKASQHFARVAVVQHAPSESVDNASMPPVKVEFSLTDYGSKEKLVDFLSRGMTQLQGTRALGSAIEYTIENVFESAPNPRDLKIVVLMLTGEVPEQQLEEAQRVILQAKCKGYFFVVLGIGRKVNIKEVYTFASEPNDVFFKLVDKSTELNEEPLMRFGRLLPSFVSSENAFYLSPDIRKQCDWFQGDQPTKNLVKFGHKQVNVPNNVTSSPTSNPVTTTKPVTTTKPVTTTTKPVTTTTKPVTIINQPSVKPAAAKPAPAKPVAAKPVATKTATVRPPVAVKPATAAKPVAAKPAAVRPPAAAAKPVATKPEVPRPQAAKPAATKPATTKPVVKMLREVQVFEITENSAKLHWERPEPPGPYFYDLTVTSAHDQSLVLKQNLTVTDRVIGGLLAGQTYHVAVVCYLRSQVRATYHGSFSTKKSQPPPPQPARSASSSTINLMVSTEPLALTETDICKLPKDEGTCRDFILKWYYDPNTKSCARFWYGGCGGNENKFGSQKECEKVCAPVLAKPGVISVMGT

SEQ ID NO: 203 - protein, 303 aa, Homo sapiens
MRAWIFFLLCLAGRALAAPQQEALPDETEVVEETVAEVTEVSVGANPVQVEVGEFDDGAEETEEEVVAENPCQNHHCKHGKVCELDENNTPMCVCQDPTSCPAPIGEFEKVCSNDNKTFDSSCHFFATKCTLEGTKKGHKLHLDYIGPCKYIPPCLDSELTEFPLRMRDWLKNVLVTLYERDEDNNLLTEKQKLRVKKIHENEKRLEAGDHPVELLARDFEKNYNMYIFPVHWQFGQLDQHPIDGYLSHTELAPLRAPLIPMEHCTTRFFETCDLDNDKYIALDEWAGCFGIKQKDIDKDLVI

SEQ ID NO: 204 - protein, 391 aa, Homo sapiens; identical to SEQ ID NO: 197

SEQ ID NO: 205 - protein, 143 aa, Homo sapiens
MQHRGFLLLTLLALLALTSAVAKKKDKVKKGGPGSECAEWAWGPCTPSSKDCGVGFREGTCGAQTQRIRCRVPCNWKKEFGADCKYKFENWGACDGGTGTKVRQGTLKKARYNAQCQETIRVTKPCTPKTKAKAKAKKGKGKD

SEQ ID NO: 206 - protein, 499 aa, Homo sapiens
  misc_feature (498)..(498): selenocysteine
MNGPEDLPKSYDYDLIIIGGGSGGLAAAKEAAQYGKKVMVLDFVTPTPLGTRWGLGGTCVNVGCIPKKLMHQAALLGQALQDSRNYGWKVEETVKHDWDRMIEAVQNHIGSLNWGYRVALREKKVVYENAYGQFIGPHRIKATNNKGKEKIYSAERFLIATGERPRYLGIPGDKEYCISSDDLFSLPYCPGKTLVVGASYVALECAGFLAGIGLDVTVMVRSILLRGFDQDMANKIGEHMEEHGIKFIRQFVPIKVEQIEAGTPGRLRVVAQSTNSEEIIEGEYNTVMLAIGRDACTRKIGLETVGVKINEKTGKIPVTDEEQTNVPYIYAIGDILEDKVELTPVAIQAGRLLAQRLYAGSTVKCDYENVPTTVFTPLEYGACGLSEEKAVEKFGEENIEVYHSYFWPLEWTIPSRDNNKCYAKIICNTKDNERVVGFHVLGPNAGEVTQGFAAALKCGLTKKQLDSTIGIHPVCAEVFTTLSVTKRSGASILQAGCXG

SEQ ID NO: 207 - protein, 210 aa, Homo sapiens
MTAAQAAGEEAPPGVRSVKVVLVGDGGCGKTSLLMVFADGAFPESYTPTVFERYMVNLQVKGKPVHLHIWDTAGQDDYDRLRPLFYPDASVLLLCFDVTSPNSFDNIFNRWYPEVNHFCKKVPIIVVGCKTDLRKDKSLVNKLRRNGLEPVTYHRGQEMARSVGAVAYLECSARLHDNVHAVFQEAAEVALSSRGRNFWRRITQGFCVVT

SEQ ID NO: 208 - protein, 72 aa, Homo sapiens; identical to SEQ ID NO: 153

SEQ ID NO: 209 - protein, 256 aa, Homo sapiens
MGNGTEEDYNFVFKVVLIGESGVGKTNLLSRFTRNEFSHDSRTTIGVEFSTRTVMLGTAAVKAQIWDTAGLERYRAITSAYYRGAVGALLVFDLTKHQTYAVVERWLKELYDHAEATIVVMLVGNKSDLSQAREVPTEEARMFAENNGLLFLETSALDSTNVELAFETVLKEIFAKVSKQRQNSIRTNAITLGSARLDRSLAWGEEGLLHQPLTLASTTCPHWLFVPLVPTSAPGPFLALWFQISDCSLFTAPSGS

SEQ ID NO: 210 - protein, 513 aa, Homo sapiens
MAPARTMARARLAPAGIPAVALWLLCTLGLQGTQAGPPPAPPGLPAGADCLNSFTAGVPGFVLDTNASVSNGATFLESPTVRRGWDCVRACCTTQNCNLALVELQPDRGEDAIAACFLINCLYEQNFVCKFAPREGFINYLTREVYRSYRQLRTQGFGGSGIPKAWAGIDLKVQPQEPLVLKDVENTDWRLLRGDTDVRVERKDPNQVELWGLKEGTYLFQLTVTSSDHPEDTANVTVTVLSTKQTEDYCLASNKVGRCRGSFPRWYYDPTEQICKSFVYGGCLGNKNNYLREEECILACRGVQGPSMERRHPVCSGTCQPTQFRCSNGCCIDSFLECDDTPNCPDASDEAACEKYTSGFDELQRIHFPSDKGHCVDLPDTGLCKESIPRWYYNPFSEHCARFTYGGCYGNKNNFEEEQQCLESCRGISKKDVFGLRREIPIPSTGSVEMAVAVFLVICIVVVVAILGYCFFKNQRKDFHGHHHHPPPTPASSTVSTTEDTEHLVYNHTTRPL

SEQ ID NO: 211 - protein, 252 aa, Homo sapiens
MAQLCGLRRSRAFLALLGSLLLSGVLAADRERSIHDFCLVSKVVGRCRASMPRWWYNVTDGSCQLFVYGGCDGNSNNYLTKEECLKKCATVTENATGDLATSRNAADSSVPSAPRRQDSEDHSSDMFNYEEYCTANAVTGPCRASFPRWYFDVERNSCNNFIYGGCRGNKNSYRSEEACMLRCFRQQENPPLPLGSKVVVLAGLFVMVLILFLGASMVYLIRVARRNQERALRTVWSSGDDKEQLVKNTYVL

SEQ ID NO: 212 - protein, 163 aa, Homo sapiens
MSLLLLVVSALHILILILLFVATLDKSWWTLPGKESLNLWYDCTWNNDTKTWACSNVSENGWLKAVQVLMVLSLILCCLSFILFMFQLYTMRRGGLFYATGLCQLCTSVAVFTGALIYAIHAEEILEKHPRGGSFGYCFALAWVAFPLALVSGIIYIHLRKRE

SEQ ID NO: 213 - protein, 1205 aa, Homo sapiens
MVKCYHKKYRSATRDVIFRLQFHTGAVQGYGLVFGKEDLDNASKDDRFPDYGKVELVFSATPEKIQGSEHLYNDHGVIVDYNTTDPLIRWDSYENLSADGEVLHTQGPVDGSLYAKVRKKSSSDPGIPGGPQAIPATNSPDHSDHTLSVSSDSGHSTASARTDKTEERLAPGTRRGLSAQEKAELDQLLSGFGLEDPGSSLKEMTDARSKYSGTRHVVPAQVHVNGDAALKDRETDILDDEMPHHDLHSVDSLGTLSSSEGPQSAHLGPFTCHKSSQNSLLSDGFGSNVGEDPQGTLVPDLGLGMDGPYERERTFGSREPKQPQPLLRKPSVSAQMQAYGQSSYSTQTWVRQQQMVVAHQYSFAPDGEARLVSRCPADNPGLVQAQPRVPLTPTRGTSSRVAVQRGVGSGPHPPDTQQPSPSKAFKPRFPGDQVVNGAGPELSTGPSPGSPTLDIDQSIEQLNRLILELDPTFEPIPTHMNALGSQANGSVSPDSVGGGLRASSRLPDTGEGPSRATGRQGSSAEQPLGGRLRKLSLGQYDNDAGGQLPFSKCAWGKAGVDYAPNLPPFPSPADVKETMTPGYPQDLDIIDGRILSSKESMCSTPAFPVSPETPYVKTALRHPPFSPPEPPLSSPASQHKGGREPRSCPETLTHAVGMSESPIGPKSTMLRADASSTPSFQQAFASSCTISSNGPGQRRESSSSAERQWVESSPKPMVSLLGSGRPTGSPLSAEFSGTRKDSPVLSCFPPSELQAPFHSHELSLAEPPDSLAPPSSQAFLGFGTAPVGSGLPPEEDLGALLANSHGASPTPSIPLTATGAADNGFLSHNFLTVAPGHSSHHSPGLQGQGVTLPGQPPLPEKKRASEGDRSLGSVSPSSSGFSSPHSGSTISIPFPNVLPDFSKASEAASPLPDSPGDKLVIVKFVQDTSKFWYKADISREQAIAMLKDKEPGSFIVRDSHSFRGAYGLAMKVATPPPSVLQLNKKAGDLANELVRHFLIECTPKGVRLKGCSNEPYFGSLTALVCQHSITPLALPCKLLIPERDPLEEIAESSPQTAANSAAELLKQGAACNVWYLNSVEMESLTGHQAIQKALSITLVQEPPPVSTVVHFKVSAQGITLTDNQRKLFFRRHYPVNSVIFCALDPQDRKWIKDGPSSKVFGFVARKQGSATDNVCHLFAEHDPEQPASAIVNFVSKVMIGSPKKV

SEQ ID NO: 214 - protein, 826 aa, Homo sapiens
MEGAGGANDKKKISSERRKEKSRDAARSRRSKESEVFYELAHQLPLPHNVSSHLDKASVMRLTISYLRVRKLLDAGDLDIEDDMKAQMNCFYLKALDGFVMVLTDDGDMIYISDNVNKYMGLTQFELTGHSVFDFTHPCDHEEMREMLTHRNGLVKKGKEQNTQRSFFLRMKCTLTSRGRTMNIKSATWKVLHCTGHIHVYDTNSNQPQCGYKKPPMTCLVLICEPIPHPSNIEIPLDSKTFLSRHSLDMKFSYCDERITELMGYEPEELLGRSIYEYYHALDSDHLTKTHHDMFTKGQVTTGQYRMLAKRGGYVWVETQATVIYNTKNSQPQCIVCVNYVVSGIIQHDLIFSLQQTECVLKPVESSDMKMTQLFTKVESEDTSSLFDKLKKEPDALTLLAPAAGDTIISLDFGSNDTETDDQQLEEVPLYNDVMLPSPNEKLQNINLAMSPLPTAETPKPLRSSADPALNQEVALKLEPNPESLELSFTMPQIQDQTPSPSDGSTRQSSPEPNSPSEYCFYVDSDMVNEFKLELVEKLFAEDTEAKNPFSTQDTDLDLEMLAPYIPMDDDFQLRSFDQLSPLESSSASPESASPQSTVTVFQQTQIQEPTANATTTTATTDELKTVTKDRMEDIKILIASPSPTHIHKETTSATSSPYRDTQSRTASPNRAGKGVIEQTEKSHPRSPNVLSVALSQRTTVPEEELNPKILALQNAQRKRKMEHDGSLFQAVGIGTLLQQPDDHAATTSLSWKRVKGCKSSEQNGMEQKTIILIPSDLACRLLGQSMDESGLPQLTSYDCEVNAPIQGSRNLLQGEELLRALDQVN

SEQ ID NO: 215 - protein, 855 aa, Homo sapiens [sequence omitted]

SEQ ID NO: 216 - protein, 414 aa, Homo sapiens
MIPLEKPGSGGSSPGATSGSGRAGRGLSGPCRPPPPPQARGLLTEIRAVVRTEPFQDGYSLCPGRELGRGKFAVVRKCIKKDSGKEFAAKFMRKRRKGQDCRMEIIHEIAVLELAQDNPWVINLHEVYETASEMILVLEYAAGGEIFDQCVADREEAFKEKDVQRLMRQILEGVHFLHTRDVVHLDLKPQNILLTSESPLGDIKIVDFGLSRILKNSEELREIMGTPEYVAPEILSYDPISMATDMWSIGVLTYVMLTGISPFLGNDKQETFLNISQMNLSYSEEEFDVLSESAVDFIRTLLVKKPEDRATAEECLKHPWLTQSSIQEPSFRMEKALEEANALQEGHSVPEINSDTDKSETEESIVTEELIVVTSYTLGQCRQSEKEKMEQKAISKRFKFEEPLLQEIPGEFIY

SEQ ID NO: 217 - protein, 246 aa, Homo sapiens
MVSDLVIILNYDRAVEAFAKGGNLTLGGNLTVAVGPLGRNLEGNVALRSSAAVFTYCKSRGLFAGVSLEGSCLIERKETNRKFYCQDIRAYDILFGDTPRPAQAEDLYEILDSFTEKYENEGQRINARKAAREQRKSSAKELPPKPLSRPQQSSAPVQLNSGSQSNRNEYKLYPGLSSYHERVGNLNQPIEVTALYSFEGQQPGDLNFQAGDRITVISKTDSHFDWWEGKLRGQTGIFPANYVTMN

SEQ ID NO: 218 - protein, 746 aa, Homo sapiens
MQAKKRYFILLSAGSCLALLFYFGGLQFRASRSHSRREEHSGRNGLHHPSPDHFWPRFPEPLRPFVPWDQLENEDSSVHISPRQKRDANSSIYKGKKCRMESCFDFTLCKKNGFKVYVYPQQKGEKIAESYQNILAAIEGSRFYTSDPSQACLFVLSLDTLDRDQLSPQYVHNLRSKVQSLHLWNNGRNHLIFNLYSGTWPDYTEDVGFDIGQAMLAKASISTENFRPNFDVSIPLFSKDHPRTGGERGFLKFNTIPPLRKYMLVFKGKRYLTGIGSDTRNALYHVHNGEDVVLLTTCKHGKDWQKHKDSRCDRDNTEYEKYDYREMLHNATFCLVPRGRRLGSFRFLEALQAACVPVMLSNGWELPFSEVINWNQAAVIGDERLLLQIPSTIRSIHQDKILALRQQTQFLWEAYFSSVEKIVLTTLEIIQDRIFKHISRNSLIWNKHPGGLFVLPQYSSYLGDFPYYYANLGLKPPSKFTAVIHAVTPLVSQSQPVLKLLVAAAKSQYCAQIIVLWNCDKPLPAKHRWPATAVPVVVIEGESKVMSSRFLPYDNIITDAVLSLDEDTVLSTTEVDFAFTVWQSFPERIVGYPARSHFWDNSKERWGYTSKWTNDYSMVLTGAAIYHKYYHYLYSHYLPASLKNMVDQLANCEDILMNFLVSAVTKLPPIKVTQKKQYKETMMGQTSRASRWADPDHFAQRQSCMNTFASWFGYMPLIHSQMRLDPVLFKDQVSILRKKYRDIERL

SEQ ID NO: 219 - protein, 657 aa, Homo sapiens
MRLKIGFILRSLLVVGSFLGLVVLWSSLTPRPDDPSPLSRMREDRDVNDPMPNRGGNGLAPGEDRFKPVVPWPHVEGVEVDLESIRRINKAKNEQEHHAGGDSQKDIMQRQYLTFKPQTFTYHDPVLRPGILGNFEPKEPEPPGVVGGPGEKAKPLVLGPEFKQAIQASIKEFGFNMVASDMISLDRNVNDLRQEECKYWHYDENLLTSSVVIVFHNEGWSTLMRTVHSVIKRTPRKYLAEIVLIDDFSNKEHLKEKLDEYIKLWNGLVKVFRNERREGLIQARSIGAQKAKLGQVLIYLDAHCEVAVNWYAPLVAPISKDRTICTVPLIDVINGNTYEIIPQGGGDEDGYARGAWDWSMLWKRVPLTPQEKRLRKTKTEPYRSPAMAGGLCAIEREFFFELGLYDPSLQIWGGENFEISYKIWQCGGKLLFVPCSRVGHIYRLEGWQGNPPPIYVGSSPTLKNYVRVVEVWWDEYKDYFYASRPESQALPYGDISELKKFREDHNCQSFKWFMEEIAYDITSHYPLPPKNVDWGEIRGFETAYCIDSMGKTNGGFVELGPCHRMGGNQLFRINEANQLMQYDQCLTKGADGSKVMITHCNLNEFKEWQYFKNLHRFTHIPSGKCLDRSEVLHQVFISNCDSSKTTQKWEMNNIHSV

SEQ ID NO: 220 - protein, 310 aa, Homo sapiens
MRRAALWLWLCALALSLQPALPQIVATNLPPEDQDGSGDDSDNFSGSGAGALQDITLSQQTPSTWKDTQLLTAIPTSPEPTGLEATAASTSTLPAGEGPKEGEAVVLPEVEPGLTAREQEATPRPRETTQLPTTHQASTTTATTAQEPATSHPHRDMQPGHHETSTPAGPSQADLHTPHTEDGGPSATERAAEDGASSQLPAAEGSGEQDFTFETSGENTAVVAVEPDRRNQSPVDQGATGASQGLLDRKEVLGGVIAGGLVGLIFAVCLVGFMLYRMKKKDEGSYSLEEPKQANGGAYQKPTKQEEFYA

SEQ ID NO: 221 - protein, 1048 aa, Homo sapiens
MAFPPRRRLRLGPRGLPLLLSGLLLPLCRAFNLDVDSPAEYSGPEGSYFGFAVDFFVPSASSRMFLLVGAPKANTTQPGIVEGGQVLKCDWSSTRRCQPIEFDATGNRDYAKDDPLEFKSHQWFGASVRSKQDKILACAPLYHWRTEMKQEREPVGTCFLQDGTKTVEYAPCRSQDIDADGQGFCQGGFSIDFTKADRVLLGGPGSFYWQGQLISDQVAEIVSKYDPNVYSIKYNNQLATRTAQAIFDDSYLGYSVAVGDFNGDGIDDFVSGVPRAARTLGMVYIYDGKNMSSLYNFTGEQMAAYFGFSVAATDINGDDYADVFIGAPLFMDRGSDGKLQEVGQVSVSLQRASGDFQTTKLNGFEVFARFGSAIAPLGDLDQDGFNDIAIAAPYGGEDKKGIVYIFNGRSTGLNAVPSQILEGQWAARSMPPSFGYSMKGATDIDKNGYPDLIVGAFGVDRAILYRARPVITVNAGLEVYPSILNQDNKTCSLPGTALKVSCFNVRFCLKADGKGVLPRKLNFQVELLLDKLKQKGAIRRALFLYSRSPSHSKNMTISRGGLMQCEELIAYLRDESEFRDKLTPITIFMEYRLDYRTAADTTGLQPILNQFTPANISRQAHILLDCGEDNVCKPKLEVSVDSDQKKIYIGDDNPLTLIVKAQNQGEGAYEAELIVSIPLQADFIGVVRNNEALARLSCAFKTENQTRQVVCDLGNPMKAGTQLLAGLRFSVHQQSEMDTSVKFDLQIQSSNLFDKVSPVVSHKVDLAVLAAVEIRGVSSPDHIFLPIPNWEHKENPETEEDVGPVVQHIYELRNNGPSSFSKAMLHLQWPYKYNNNTLLYILHYDIDGPMNCTSDMEINPLRIKISSLQTTEKNDTVAGQGERDHLITKRDLALSEGDIHTLGCGVAQCLKIVCQVGRLDRGKSAILYVKSLLWTETFMNKENQNHSYSLKSSASFNVIEFPYKNLPIEDITNSTLVTTNVTWGIQPAPMPVPVWVIILAVLAGLLLLAVLVFVMYRMGFFKRVRPPQEEQEREQLQPHENGEGNSET

SEQ ID NO: 222 - protein, 673 aa, Homo sapiens
MAKPAQGAKYRGSIHDFPGFDPNQDAEALYTAMKGFGSDKEAILDIITSRSNRQRQEVCQSYKSLYGKDLIADLKYELTGKFERLIVGLMRPPAYCDAKEIKDAISGIGTDEKCLIEILASRTNEQMHQLVAAYKDAYERDLEADIIGDTSGHFQKMLVVLLQGTREEDDVVSEDLVQQDVQDLYEAGELKWGTDEAQFIYILGNRSKQHLRLVFDEYLKTTGKPMKASIRGELSGDFEKLMLAVVKCIRSTPEYFAERLFKAMKGLGTRDNTLIRIMVSRSELDMLDIREIFRTKYEKSLYSMIKNDTSGEYKKTLLKLSGGDDDAAGQFFPEAAQVAYQMWELSAVARVELKGTVRPANDFNPDADAKALRKAMKGLGTDEDTIIDIITHRSNVQRQQIRQTFKSHFGRDLMTDLKSEISGDLARLILGLMMPPAHYDAKQLKKAMEGAGTDEKALIEILATRTNAEIRAINEAYKEDYHKSLEDALSSDTSGHFRRILISLATGHREEGGENLDQAREDAQVAAEILEIADTPSGDKTSLETRFMTILCTRTYPHLRRVFQEFIKMTNYDVEHTIKKEMSGDVRDAFVAIVQSVKNKPLFFADKLYKSMKGAGTDEKTLTRIMVSRSEIDLLNIRREFIEKYDKSLHQAIEGDTSGDFLKALLALCGGED

SEQ ID NO: 223 - protein, 345 aa, Homo sapiens
MSLFGLLLLTSALAGQRQGTQAESNLSSKFQFSSNKEQNGVQDPQHERIITVSTNGSIHSPRFPHTYPRNTVLVWRLVAVEENVWIQLTFDERFGLEDPEDDICKYDFVEVEEPSDGTILGRWCGSGTVPGKQISKGNQIRIRFVSDEYFPSEPGFCIHYNIVMPQFTEAVSPSVLPPSALPLDLLNNAITAFSTLEDLIRYLEPERWQLDLEDLYRPTWQLLGKAFVFGRKSRVVDLNLLTEEVRLYSCTPRNFSVSIREELKRTDTIFWPGCLLVKRCGGNCACCLHNCNECQCVPSKVTKKYHEVLQLRPKTGVRGLHKSLTDVALEHHEECDCVCRGSTGG

SEQ ID NO: 224 - protein, 2647 aa, Homo sapiens
MSSSHSRAGQSAAGAAPGGGVDTRDAEMPATEKDLAEDAPWKKIQQNTFTRWCNEHLKCVSKRIANLQTDLSDGLRLIALLEVLSQKKMHRKHNQRPTFRQMQLENVSVALEFLDRESIKLVSIDSKAIVDGNLKLILGLIWTLILHYSISMPMWDEEEDEEAKKQTPKQRLLGWIQNKLPQLPITNFSRDWQSGRALGALVDSCAPGLCPDWDSWDASKPVTNAREAMQQADDWLGIPQVITPEEIVDPNVDEHSVMTYLSQFPKAKLKPGAPLRPKLNPKKARAYGPGIEPTGNMVKKRAEFTVETRSAGQGEVLVYVEDPAGHQEEAKVTANNDKNRTFSVWYVPEVTGTHKVTVLFAGQHIAKSPFEVYVDKSQGDASKVTAQGPGLEPSGNIANKTTYFEIFTAGAGTGEVEVVIQDPMGQKGTVEPQLEARGDSTYRCSYQPTMEGVHTVHVTFAGVPIPRSPYTVTVGQACNPSACRAVGRGLQPKGVRVKETADFKVYTKGAGSGELKVTVKGPKGEERVKQKDLGDGVYGFEYYPMVPGTYIVTITWGGQNIGRSPFEVKVGTECGNQKVRAWGPGLEGGVVGKSADFVVEAIGDDVGTLGFSVEGPSQAKIECDDKGDGSCDVRYWPQEAGEYAVHVLCNSEDIRLSPFMADIRDAPQDFHPDRVKARGPGLEKTGVAVNKPAEFTVDAKHGGKAPLRVQVQDNEGCPVEALVKDNGNGTYSCSYVPRKPVKHTAMVSWGGVSIPNSPFRVNVGAGSHPNKVKVYGPGVAKTGLKAHEPTYFTVDCAEAGQGDVSIGIKCAPGVVGPAEADIDFDIIRNDNDTFTVKYTPRGAGSYTIMVLFADQATPTSPIRVKVEPSHDASKVKAEGPGLSRTGVELGKPTHFTVNAKAAGKGKLDVQFSGLTKGDAVRDVDIIDHHDNTYTVKYTPVQQGPVGVNVTYGGDPIPKSPFSVAVSPSLDLSKIKVSGLGEKVDVGKDQEFTVKSKGAGGQGKVASKIVGPSGAAVPCKVEPGLGADNSVVRFLPREEGPYEVEVTYDGVPVPGSPFPLEAVAPTKPSKVKAFGPGLQGGSAGSPARFTIDTKGAGTGGLGLTVEGPCEAQLECLDNGDGTCSVSYVPTEPGDYNINILFADTHIPGSPFKAHVVPCFDASKVKCSGPGLERATAGEVGQFQVDCSSAGSAELTIEICSEAGLPAEVYIQDHGDGTHTITYIPLCPGAYTVTIKYGGQPVPNFPSKLQVEPAVDTSGVQCYGPGIEGQGVFREATTEFSVDARALTQTGGPHVKARVANPSGNLTETYVQDRGDGMYKVEYTPYEEGLHSVDVTYDGSPVPSSPFQVPVTEGCDPSRVRVHGPGIQSGTTNKPNKFTVETRGAGTGGLGLAVEGPSEAKMSCMDNKDGSCSVEYIPYEAGTYSLNVTYGGHQVPGSPFKVPVHDVTDASKVKCSGPGLSPGMVRANLPQSFQVDTSKAGVAPLQVKVQGPKGLVEPVDVVDNADGTQTVNYVPSREGPYSISVLYGDEEVPRSPFKVKVLPTHDASKVKASGPGLNTTGVPASLPVEFTIDAKDAGEGLLAVQITDPEGKPKKTHIQDNHDGTYTVAYVPDVTGRYTILIKYGGDEIPFSPYRVRAVPTGDASKCTVTVSIGGHGLGAGIGPTIQIGEETVITVDTKAAGKGKVTCTVCTPDGSEVDVDVVENEDGTFDIFYTAPQPGKYVICVRFGGEHVPNSPFQVTALAGDQPSVQPPLRSQQLAPQYTYAQGGQQTWAPERPLVGVNGLDVTSLRPFDLVIPFTIKKGEITGEVRMPSGKVAQPTITDNKDGTVTVRYAPSEAGLHEMDIRYDNMHIPGSPLQFYVDYVNCGHVTAYGPGLTHGVVNKPATFTVNTKDAGEGGLSLAIEGPSKAEISCTDNQDGTCSVSYLPVLPGDYSILVKYNEQHVPGSPFTARVTGDDSMRMSHLKVGSAADIPINISETDLSLLTATVVPPSGREEPCLLKRLRNGHVGISFVPKETGEHLVHVKKNGQHVASSPIPVVISQSEIGDASRVRVSGQGLHEGHTFEPAEFIIDTRDAGYGGLSLSIEGPSKVDINTEDLEDGTCRVTYCPTEPGNYIINIKFADQHVPGSPFSVKVTGEGRVKESITRRRRAPSVANVGSHCDLSLKIPEISIQDMTAQVTSPSGKTHEAEIVEGENHTYCIRFVPAEMGTHTVSVKYKGQHVPGSPFQFTVGPLGEGGAHKVRAGGPGLERAEAGVPAEFSIWTREAGAGGLAIAVEGPSKAEISFEDRKDGSCGVAYVVQEPGDYEVSVKFNEEHIPDSPFVVPVASPSGDARRLTVSSLQESGLKVNQPASFAVSLNGAKGAIDAKVHSPSGALEECYVTEIDQDKYAVRFIPRENGVYLIDVKFNGTHIPGSPFKIRVGEPGHGGDPGLVSAYGAGLEGGVTGNPAEFVVNTSNAGAGALSVTIDGPSKVKMDCQECPEGYRVTYTPMAPGSYLISIKYGGPYHIGGSPFKAKVTGPRLVSNHSLHETSSVFVDSLTKATCAPQHGAPGPGPADASKVVAKGLGLSKAYVGQKSSFTVDCSKAGNNMLLVGVHGPRTPCEEILVKHVGSRLYSVSYLLKDKGEYTLVVKWGHEHIPGSPYRVVVP

SEQ ID NO: 225 - protein, 2647 aa, Homo sapiens; identical to SEQ ID NO: 224

SEQ ID NO: 226 - protein, 451 aa, Homo sapiens
MRECISIHVGQAGVQIGNACWELYCLEHGIQPDGQMPSDKTIGGGDDSFNTFFSETGAGKHVPRAVFVDLEPTVIDEVRTGTYRQLFHPEQLITGKEDAANNYARGHYTIGKEIIDLVLDRIRKLADQCTGLQGFLVFHSFGGGTGSGFTSLLMERLSVDYGKKSKLEFSIYPAPQVSTAVVEPYNSILTTHTTLEHSDCAFMVDNEAIYDICRRNLDIERPTYTNLNRLIGQIVSSITASLRFDGALNVDLTEFQTNLVPYPRIHFPLATYAPVISAEKAYHEQLSVAEITNACFEPANQMVKCDPRHGKYMACCLLYRGDVVPKDVNAAIATIKTKRTIQFVDWCPTGFKVGINYQPPTVVPGGDLAKVQRAVCMLSNTTAIAEAWARLDHKFDLMYAKRAFVHWYVGEGMEEGEFSEAREDMAALEKDYEEVGVDSVEGEGEEEGEEY

SEQ ID NO: 227 - protein, 774 aa, Homo sapiens
MERPLCSHLCSCLAMLALLSPLSLAQYDSWPHYPEYFQQPAPEYHQPQAPANVAKIQLRLAGQKRKHSEGRVEVYYDGQWGTVCDDDFSIHAAHVVCRELGYVEAKSWTASSSYGKGEGPIWLDNLHCTGNEATLAACTSNGWGVTDCKHTEDVGVVCSDKRIPGFKFDNSLINQIENLNIQVEDIRIRAILSTYRKRTPVMEGYVEVKEGKTWKQICDKHWTAKNSRVVCGMFGFPGERTYNTKVYKMFASRRKQRYWPFSMDCTGTEAHISSCKLGPQVSLDPMKNVTCENGLPAVVSCVPGQVFSPDGPSRFRKAYKPEQPLVRLRGGAYIGEGRVEVLKNGEWGTVCDDKWDLVSASVVCRELGFGSAKEAVTGSRLGQGIGPIHLNEIQCTGNEKSIIDCKFNAESQGCNHEEDAGVRCNTPAMGLQKKLRLNGGRNPYEGRVEVLVERNGSLVWGMVCGQNWGIVEAMVVCRQLGLGFASNAFQETWYWHGDVNSNKVVMSGVKCSGTELSLAHCRHDGEDVACPQGGVQYGAGVACSETAPDLVLNAEMVQQTTYLEDRPMFMLQCAMEENCLSASAAQTDPTTGYRRLLRFSSQIHNNGQSDFRPKNGRHAWIWHDCHRHYHSMEVFTHYDLLNLNGTKVAEGHKASFCLEDTECEGDIQKNYECANFGDQGITMGCWDMYRHDIDCQWVDITDVPPGDYLFQVVINPNFEVAESDYSNNIMKCRSRYDGHRIWMYNCHIGGSFSEETEKKFEHFSGLLNNQLSPQ

SEQ ID NO: 228 - protein, 381 aa, Homo sapiens; identical to SEQ ID NO: 151

SEQ ID NO: 229 - protein, 633 aa, Homo sapiens
MAHLKRLVKLHIKRHYHKKFWKLGAVIFFFIIVLVLMQREVSVQYSKEESRMERNMKNKNKMLDLMLEAVNNIKDAMPKMQIGAPVRQNIDAGERPCLQGYYTAAELKPVLDRPPQDSNAPGASGKAFKTTNLSVEEQKEKERGEAKHCFNAFASDRISLHRDLGPDTRPPECIEQKFKRCPPLPTTSVIIVFHNEAWSTLLRTVHSVLYSSPAILLKEIILVDDASVDEYLHDKLDEYVKQFSIVKIVRQRERKGLITARLLGATVATAETLTFLDAHCECFYGWLEPLLARIAENYTAVVSPDIASIDLNTFEFNKPSPYGSNHNRGNFDWSLSFGWESLPDHEKQRRKDETYPIKTPTFAGGLFSISKEYFEYIGSYDEEMEIWGGENIEMSFRVWQCGGQLEIMPCSVVGHVFRSKSPHSFPKGTQVIARNQVRLAEVWMDEYKEIFYRRNTDAAKIVKQKAFGDLSKRFEIKHRLRCKNFTWYLNNIYPEVYVPDLNPVISGYIKSVGQPLCLDVGENNQGGKPLIMYTCHGLGGNQYFEYSAQHEIRHNIQKELCLHAAQGLVQLKACTYKGHKTVVTGEQIWEIQKDQLLYNPFLKMCLSANGEHPSLVSCNPSDPLQKWILSQND

SEQ ID NO: 230 - protein, 2468 aa, Homo sapiens
MATVVVEATEPEPSGSIANPAASTSPSLSHRFLDSKFYLLVVVGEIVTEEHLRRAIGNIELGIRSWDTNLIECNLDQELKLFVSRHSARFSPEVPGQKILHHRSDVLETVVLINPSDEAVSTEVRLMITDAARHKLLVLTGQCFENTGELILQSGSFSFQNFIEIFTDQEIGELLSTTHPANKASLTLFCPEEGDWKNSNLDRHNLQDFINIKLNSASILPEMEGLSEFTEYLSESVEVPSPFDILEPPTSGGFLKLSKPCCYIFPGGRGDSALFAVNGFNMLINGGSERKSCFWKLIRHLDRVDSILLTHIGDDNLPGINSMLQRKIAELEEEQSQGSTTNSDWMKNLISPDLGVVFLNVPENLKNPEPNIKMKRSIEEACFTLQYLNKLSMKPEPLFRSVGNTIDPVILFQKMGVGKLEMYVLNPVKSSKEMQYFMQQWTGTNKDKAEFILPNGQEVDLPISYLTSVSSLIVWHPANPAEKIIRVLFPGNSTQYNILEGLEKLKHLDFLKQPLATQKDLTGQVPTPVVKQTKLKQRADSRESLKPAAKPLPSKSVRKESKEETPEVTKVNHVEKPPKVESKEKVMVKKDKPVKTETKPSVTEKEVPSKEEPSPVKAEVAEKQATDVKPKAAKEKTVKKETKVKPEDKKEEKEKPKKEVAKKEDKTPIKKEEKPKKEEVKKEVKKEIKKEEKKEPKKEVKKETPPKEVKKEVKKEEKKEVKKEEKEPKKEIKKLPKDAKKSSTPLSEAKKPAALKPKVPKKEESVKKDSVAAGKPKEKGKIKVIKKEGKAAEAVAAAVGTGATTAAVMAAAGIAAIGPAKELEAERSLMSSPEDLTKDFEELKAEEVDVTKDIKPQLELIEDEEKLKETEPVEAYVIQKEREVTKGPAESPDEGITTTEGEGECEQTPEELEPVEKQGVDDIEKFEDEGAGFEESSETGDYEEKAETEEAEEPEEDGEEHVCVSASKHSPTEDEESAKAEADAYIREKRESVASGDDRAEEDMDEAIEKGEAEQSEEEADEEDKAEDAREEEYEPEKMEAEDYVMAVVDKAAEAGGAEEQYGFLTTPTKQLGAQSPGREPASSIHDETLPGGSESEATASDEENREDQPEEFTATSGYTQSTIEISSEPTPMDEMSTPRDVMSDETNNEETESPSQEFVNITKYESSLYSQEYSKPADVTPLNGFSEGSKTDATDGKDYNASASTISPPSSMEEDKFSRSALRDAYCSEVKASTTLDIKDSISAVSSEKVSPSKSPSLSPSPPSPLEKTPLGERSVNFSLTPNEIKVSAEAEVAPVSPEVTQEVVEEHCASPEDKTLEVVSPSQSVTGSAGHTPYYQSPTDEKSSHLPTEVIEKPPAVPVSFEFSDAKDENERASVSPMDEPVPDSESPIEKVLSPLRSPPLIGSESAYESFLSADDKASGRGAESPFEEKSGKQGSPDQVSPVSEMTSTSLYQDKQEGKSTDFAPIKEDFGQEKKTDDVEAMSSQPALALDERKLGDVSPTQIDVSQFGSFKEDTKMSISEGTVSDKSATPVDEGVAEDTYSHMEGVASVSTASVATSSFPEPTTDDVSPSLHAEVGSPHSTEVDDSLSVSVVQTPTTFQETEMSPSKEECPRPMSISPPDFSPKTAKSRTPVQDHRSEQSSMSIEFGQESPEQSLAMDFSRQSPDHPTVGAGVLHITENGPTEVDYSPSDMQDSSLSHKIPPMEEPSYTQDNDLSELISVSQVEASPSTSSAHTPSQIASPLQEDTLSDVAPPRDMSLYASLTSEKVQSLEGEKLSPKSDISPLTPRESSPLYSPTFSDSTSAVKEKTATCHSSSSPPIDAASAEPYGFRASVLFDTMQHHLALNRDLSTPGLEKDSGGKTPGDFSYAYQKPEETTRSPDEEDYDYESYEKTTRTSDVGGYYYEKIERTTKSPSDSGYSYETIGKTTKTPEDGDYSYEIIEKTTRTPEEGGYSYDISEKTTSPPEVSGYSYEKTERSRRLLDDISNGYDDSEDGGHTLGDPSYSYETTEKITSFPESEGYSYETSTKTTRTPDTSTYCYETAEKITRTPQASTYSYETSDLCYTAEKKSPSEARQDVDLCLVSSCEYKHPKTELSPSFINPNPLEWFASEEPTEESEKPLTQSGGAPPPPGGKQQGRQCDETPPTSVSESAPSQTDSDVPPETEECPSITADANIDSEDESETIPTDKTVTYKHMDPPPAPVQDRSPSPRHPDVSMVDPEALAIEQNLGKALKKDLKEKTKTKKPGTKTKSSSPVKKSDGKSKPLAASPKPAGLKESSDKVSRVASPKKKESVEKAAKPTTTPEVKAARGEEKDKETKNAANASASKSAKTATAGPGTTKTTKSSAVPPGLPVYLDLCYIPNHSNSKNVDVEFFKRVRSSYYVVSGNDPAAEEPSRAVLDALLEGKAQWGSNMQVTLIPTHDSEVMREWYQETHEKQQDLNIMVLASSSTVVMQDESFPACKIEL

SEQ ID NO: 231 - protein, 446 aa, Homo sapiens
MREIVHIQAGQCGNQIGTKFWEVISDEHGIDPAGGYVGDSALQLERINVYYNESSSQKYVPRAALVDLEPGTMDSVRSGPFGQLFRPDNFIFGQTGAGNNWAKGHYTEGAELVDAVLDVVRKECEHCDCLQGFQLTHSLGGGTGSGMGTLLISKIREEFPDRIMNTFSVMPSPKVSDTVVEPYNATLSVHQLVENTDETYCIDNEALYDICFRTLKLTTPTYGDLNHLVSATMSGVTTSLRFPGQLNADLRKLAVNMVPFPRLHFFMPGFAPLTSRGSQQYRALTVPELTQQMFDARNMMAACDPRHGRYLTVATVFRGPMSMKEVDEQMLAIQSKNSSYFVEWIPNNVKVAVCDIPPRGLKMASTFIGNSTAIQELFKRISEQFSAMFRRKAFLHWFTGEGMDEMEFTEAESNMNDLVSEYQQYQDATANDGEEAFEDEEEEIDG

SEQ ID NO: 232 - protein, 313 aa, Homo sapiens
MPVAGSELPRRPLPPAAQERDAEPRPPHGELQYLGQIQHILRCGVRKDDRTGTGTLSVFGMQARYSLRDEFPLLTTKRVFWKGVLEELLWFIKGSTNAKELSSKGVKIWDANGSRDFLDSLGFSTREEGDLGPVYGFQWRHFGAEYRDMESDYSGQGVDQLQRVIDTIKTNPDDRRIIMCAWNPRDLPLMALPPCHALCQFYVVNSELSCQLYQRSGDMGLGVPFNIASYALLTYMIAHITGLKPGDFIHTLGDAHIYLNHIEPLKIQLQREPRPFPKLRILRKVEKIDDFKAEDFQIEGYNPHPTIKMEMAV

SEQ ID NO: 233 - protein, 729 aa, Homo sapiens
MGKKYKNIVLLKGLEVINDYHFRMVKSLLSNDLKLNLKMREEYDKIQIADLMEEKFRGDAGLGKLIKIFEDIPTLEDLAETLKKEKLKVKGPALSRKRKKEVHATSPAPSTSSTVKTEGAEATPGAQKRKKSTKEKAGPKGSKVSEEQTQPPSPAGAGMSTAMGRSPSPKTSLSAPPNSSSTENPKTVAKCQVTPRRNVLQKRPVIVKVLSTTKPFEYETPEMEKKIMFHATVATQTQFFHVKVLNTSLKEKFNGKKIIIISDYLEYDSLLEVNEESTVSEAGPNQTFEVPNKIINRAKETLKIDILHKQASGNIVYGVFMLHKKTVNQKTTIYEIQDDRGKMDVVGTGQCHNIPCEEGDKLQLFCFRLRKKNQMSKLISEMHSFIQIKKKTNPRNNDPKSMKLPQEQRQLPYPSEASTTFPESHLRTPQMPPTTPSSSFFTKKSEDTISKMNDFMRMQILKEGSHFPGPFMTSIGPAESHPHTPQMPPSTPSSSFLTTLKPRLKTEPEEVSIEDSAQSDLKEVMVLNATESFVYEPKEQKKMFHATVATENEVFRVKVFNIDLKEKFTPKKIIAIANYVCRNGFLEVYPFTLVADVNADRNMEIPKGLIRSASVTPKINQLCSQTKGSFVNGVFEVHKKNVRGEFTYYEIQDNTGKMEVVVHGRLNTINCEEGDKLKLTSFELAPKSGNTGELRSVIHSHIKVIKTRKNKKDILNPDSSMETSPDFFF

SEQ ID NO: 234 - protein, 536 aa, Homo sapiens
MNASLESLYSACSMQSDTVPLLQNGQHARSQPRASGPPRSIQPQVSPRQRVQRSQPVHILAVRRLQEEDQQFRTSSLPAIPNPFPELCGPGSPPVLTPGSLPPSQAAAKQDVKVFSEDGTSKVVEILADMTARDLCQLLVYKSHCVDDNSWTLVEHHPHLGLERCLEDHELVVQVESTMASESKFLFRKNYAKYEFFKNPMNFFPEQMVTWCQQSNGSQTQLLQNFLNSSSCPEIQGFLHVKELGKKSWKKLYVCLRRSGLYCSTKGTSKEPRHLQLLADLEDSNIFSLIAGRKQYNAPTDHGLCIKPNKVRNETKELRLLCAEDEQTRTCWMTAFRLLKYEMLLYQNYRIPQQRKALLSPFSTPVRSVSENSLVAMDFSGQTGRVIENPAEAQSAALEEGHAWRKRSTRMNILGSQSPLHPSTLSTVIHRTQHWFHGRFSREESHRIIKQQGLVDGLFLLRDSQSNPKAFVLTLCHHQKIKNFQILPCEDDGQTFFSLDDGNTKFSDLIQLVDFYQLNKGVLPCKLKHHCIRVAL

SEQ ID NO: 235 - protein, 2647 aa, Homo sapiens; identical to SEQ ID NO: 224

SEQ ID NO: 236 - protein, 2201 aa, Homo sapiens
MGAMTQLLAGVFLAFLALATEGGVLKKVIRHKRQSGVNATLPEENQPVVFNHVYNIKLPVGSQCSVDLESASGEKDLAPPSEPSESFQEHTVDGENQIVFTHRINIPRRACGCAAAPDVKELLSRLEELENLVSSLREQCTAGAGCCLQPATGRLDTRPFCSGRGNFSTEGCGCVCEPGWKGPNCSEPECPGNCHLRGRCIDGQCICDDGFTGEDCSQLACPSDCNDQGKCVNGVCICFEGYAGADCSREICPVPCSEEHGTCVDGLCVCHDGFAGDDCNKPLCLNNCYNRGRCVENECVCDEGFTGEDCSELICPNDCFDRGRCINGTCYCEEGFTGEDCGKPTCPHACHTQGRCEEGQCVCDEGFAGLDCSEKRCPADCHNRGRCVDGRCECDDGFTGADCGELKCPNGCSGHGRCVNGQCVCDEGYTGEDCSQLRCPNDCHSRGRCVEGKCVCEQGFKGYDCSDMSCPNDCHQHGRCVNGMCVCDDGYTGEDCRDRQCPRDCSNRGLCVDGQCVCEDGFTGPDCAELSCPNDCHGQGRCVNGQCVCHEGFMGKDCKEQRCPSDCHGQGRCVDGQCICHEGFTGLDCGQHSCPSDCNNLGQCVSGRCICNEGYSGEDCSEVSPPKDLVVTEVTEETVNLAWDNEMRVTEYLVVYTPTHEGGLEMQFRVPGDQTSTIIQELEPGVEYFIRVFAILENKKSIPVSARVATYLPAPEGLKFKSIKETSVEVEWDPLDIAFETWEIIFRNMNKEDEGEITKSLRRPETSYRQTGLAPGQEYEISLHIVKNNTRGPGLKRVTTTRLDAPSQIEVKDVTDTTALITWFKPLAEIDGIELTYGIKDVPGDRTTIDLTEDENQYSIGNLKPDTEYEVSLISRRGDMSSNPAKETFTTGLDAPRNLRRVSQTDNSITLEWRNGKAAIDSYRIKYAPISGGDHAEVDVPKSQQATTKTTLTGLRPGTEYGIGVSAVKEDKESNPATINAATELDTPKDLQVSETAETSLTLLWKTPLAKFDRYRLNYSLPTGQWVGVQLPRNTTSYVLRGLEPGQEYNVLLTAEKGRHKSKPARVKASTEQAPELENLTVTEVGWDGLRLNWTAADQAYEHFIIQVQEANKVEAARNLTVPGSLRAVDIPGLKAATPYTVSIYGVIQGYRTPVLSAEASTGETPNLGEVVVAEVGWDALKLNWTAPEGAYEYFFIQVQEADTVEAAQNLTVPGGLRSTDLPGLKAATHYTITIRGVTQDFSTTPLSVEVLTEEVPDMGNLTVTEVSWDALRLNWTTPDGTYDQFTIQVQEADQVEEAHNLTVPGSLRSMEIPGLRAGTPYTVTLHGEVRGHSTRPLAVEVVTEDLPQLGDLAVSEVGWDGLRLNWTAADNAYEHFVIQVQEVNKVEAAQNLTLPGSLRAVDIPGLEAATPYRVSIYGVIRGYRTPVLSAEASTAKEPEIGNLNVSDITPESFNLSWMATDGIFETFTIEIIDSNRLLETVEYNISGAERTAHISGLPPSTDFIVYLSGLAPSIRTKTISATATTEALPLLENLTISDINPYGFTVSWMASENAFDSFLVTVVDSGKLLDPQEFTLSGTQRKLELRGLITGIGYEVMVSGFTQGHQTKPLRAEIVTEAEPEVDNLLVSDATPDGFRLSWTADEGVFDNFVLKIRDTKKQSEPLEITLLAPERTRDLTGLREATEYEIELYGISKGRRSQTVSAIATTAMGSPKEVIFSDITENSATVSWRAPTAQVESFRITYVPITGGTPSMVTVDGTKTQTRLVKLIPGVEYLVSIIAMKGFEESEPVSGSFTTALDGPSGLVTANITDSEALARWQPAIATVDSYVISYTGEKVPEITRTVSGNTVEYALTDLEPATEYTLRIFAEKGPQKSSTITAKFTTDLDSPRDLTATEVQSETALLTWRPPRASVTGYLLVYESVDGTVKEVIVGPDTTSYSLADLSPSTHYTAKIQALNGPLRSNMIQTIFTTIGLLYPFPKDCSQAMLNGDTTSGLYTIYLNGDKAQALEVFCDMTSDGGGWIVFLRRKNGRENFYQNWKAYAAGFGDRREEFWLGLDNLNKITAQGQYELRVDLRDHGETAFAVYDKFSVGDAKTRYKLKVEGYSGTAGDSMAYHNGRSFSTFDKDTDSAITNCALSYKGAFWYRNCHRVNLMGRYGDNNHSQGVNWFHWKGHEHSIQFAEMKLRPSNFRNLEGRRKRA

SEQ ID NO: 237 - protein, 739 aa, Homo sapiens
MSSESKEQHNVSPRDSAEGNDSYPSGIHLELQRESSTDFKQFETNDQCRPYHRILIERQEKSDTNFKEFVIKKLQKNCQCSPAKAKNMILGFLPVLQWLPKYDLKKNILGDVMSGLIVGILLVPQSIAYSLLAGQEPVYGLYTSFFASIIYFLLGTSRHISVGIFGVLCLMIGETVDRELQKAGYDNAHSAPSLGMVSNGSTLLNHTSDRICDKSCYAIMVGSTVTFIAGVYQVAMGFFQVGFVSVYLSDALLSGFVTGASFTILTSQAKYLLGLNLPRTNGVGSLITTWIHVFRNIHKTNLCDLITSLLCLLVLLPTKELNEHFKSKLKAPIPIELVVVVAATLASHFGKLHENYNSSIAGHIPTGFMPPKVPEWNLIPSVAVDAIAISIIGFAITVSLSEMFAKKHGYTVKANQEMYAIGFCNIIPSFFHCFTTSAALAKTLVKESTGCHTQLSGVVTALVLLLVLLVIAPLFYSLQKSVLGVITIVNLRGALRKFRDLPKMWSISRMDTVIWFVTMLSSALLSTEIGLLVGVCFSIFCVILRTQKPKSSLLGLVEESEVFESVSAYKNLQTKPGIKIFRFVAPLYYINKECFKSALYKQTVNPILIKVAWKKAAKRKIKEKVVTLGGIQDEMSVQLSHDPLELHTIVIDCSAIQFLDTAGIHTLKEVRRDYEAIGIQVLLAQCNPTVRDSLTNGEYCKKEEENLLFYSVYEAMAFAEVSKNQKGVCVPNGLSLSSD

SEQ ID NO: 238 - protein, 979 aa, Homo sapiens
MVYRDDYFIRHSISVSAVIVRAWITHKYSGRDWNVKWEENLLHAVAKNYTLLQTIPPFERPFKDHQVCLEWNMGYIWNLRANRIPQCPLENDVVALLGFPYASSGENTGIVKKFPRFRNRELEATRRQRMDYPVFTVSLWLYLLHYCKANLCGILYFVDSNEMYGTPSVFLTEEGYLHIQMHLVKGEDLAVKTKFIIPLKEWFRLDISFNGGQIVVTTSIGQDLKSYHNQTISFREDFHYNDTAGYFIIGGSRYVAGIEGFFGPLKYYRLRSLHPAQIFNPLLEKQLAEQIKLYYERCAEVQEIVSVYASAAKHGGERQEACHLHNSYLDLQRRYGRPSMCRAFPWEKELKDKHPSLFQALLEMDLLTVPRNQNESVSEIGGKIFEKAVKRLSSIDGLHQISSIVPFLTDSSCCGYHKASYYLAVFYETGLNVPRDQLQGMLYSLVGGQGSERLSSMNLGYKHYQGIDNYPLDWELSYAYYSNIATKTPLDQHTLQGDQAYVETIRLKDDEILKVQTKEDGDVFMWLKHEATRGNAAAQQRLAQMLFWGQQGVAKNPEAAIEWYAKGALETEDPALIYDYAIVLFKGQGVKKNRRLALELMKKAASKGLHQAVNGLGWYYHKFKKNYAKAAKYWLKAEEMGNPDASYNLGVLHLDGIFPGVPGRNQTLAGEIFHKAAQGGHMEGTLWCSLYYITGNLETFPRDPEKAVVWAKHVAEKNGYLGHVIRKGLNAYLEGSWHEALLYYVLAAETGIEVSQTNLAHICEERPDLARRYLGVNCVWRYYNFSVFQIDAPSFAYLKMGDLYYYGHQNQSQDLELSVQMYAQAALDGDSQGFFNLALLIEEGTIIPHHILDFLEIDSTLHSNNISILQELYERCWSHSNEESFSPCSLAWLYLHLRLLWGAILHSALIYFLGTFLLSILIAWTVQYFQSVSASDPPPRPSQASPDTATSTASPAVTPAADASDQDQPTVTNNPEPRG

SEQ ID NO: 239 - protein, 416 aa, Homo sapiens
MAPRSARRPLLLLLPVAAARPHALSSAAMFMVKNGNGTACIMANFSAAFSVNYDTKSGPKNMTFDLPSDATVVLNRSSCGKENTSDPSLVIAFGRGHTLTLNFTRNATRYSVQLMSFVYNLSDTHLFPNASSKEIKTVESITDIRADIDKKYRCVSGTQVHMNNVTVTLHDATIQAYLSNSSFSRGETRCEQDRPSPTTAPPAPPSPSPSPVPKSPSVDKYNVSGTNGTCLLASMGLQLNLTYERKDNTTVTRLLNINPNKTSASGSCGAHLVTLELHSEGTTVLLFQFGMNASSSRFFLQGIQLNTILPDARDPAFKAANGSLRALQATVGNSYKCNAEEHVRVTKAFSVNIFKVWVQAFKVEGGQFGSVEECLLDENSTLIPIAVGGALAGLVLIVLIAYLVGRKRSHAGYQTI

SEQ ID NO: 240 - protein, 572 aa, Homo sapiens
MSYQGKKNIPRITSDRLLIKGGKIVNDDQSFYADIYMEDGLIKQIGENLIVPGGVKTIEAHSRMVIPGGIDVHTRFQMPDQGMTSADDFFQGTKAALAGGTTMIIDHVVPEPGTSLLAAFDQWREWADSKSCCDYSLHVDISEWHKGIQEEMEALVKDHGVNSFLVYMAFKDRFQLTDCQIYEVLSVIRDIGAIAQVHAENGDIIAEEQQRILDLGITGPEGHVLSRPEEVEAEAVNRAITIANQTNCPLYITKVMSKSSAEVIAQARKKGTVVYGEPITASLGTDGSHYWSKNWAKAAAFVTSPPLSPDPTTPDFLNSLLSCGDLQVTGSAHCTFNTAQKAVGKDNFTLIPEGTNGTEERMSVIWDKAVVTGKMDENQFVAVTSTNAAKVFNLYPRKGRIAVGSDADLVIWDPDSVKTISAKTHNSSLEYNIFEGMECRGSPLVVISQGKIVLEDGTLHVTEGSGRYIPRKPFPDFVYKRIKARSRLAELRGVPRGLYDGPVCEVSVTPKTVTPASSAKTSPAKQQAPPVRNLHQSGFSLSGAQIDDNIPRRTTQRIVAPPGGRANITSLG

SEQ ID NO: 241 - protein, 729 aa, Homo sapiens; identical to SEQ ID NO: 233

SEQ ID NO: 242 - protein, 890 aa, Homo sapiens
MEYEWKPDEQGLQQILQLLKESQSPDTTIQRTVQQKLEQLNQYPDFNNYLIFVLTKLKSEDEPTRSLSGLILKNNVKAHFQNFPNGVTDFIKSECLNNIGDSSPLIRATVGILITTIASKGELQNWPDLLPKLCSLLDSEDYNTCEGAFGALQKICEDSAEILDSDVLDRPLNIMIPKFLQFFKHSSPKIRSHAVACVNQFIISRTQALMLHIDSFIENLFALAGDEEPEVRKNVCRALVMLLEVRMDRLLPHMHNIVEYMLQRTQDQDENVALEACEFWLTLAEQPICKDVLVRHLPKLIPVLVNGMKYSDIDIILLKGDVEEDETIPDSEQDIRPRFHRSRTVAQQHDEDGIEEEDDDDDEIDDDDTISDWNLRKCSAAALDVLANVYRDELLPHILPLLKELLFHHEWVVKESGILVLGAIAEGCMQGMIPYLPELIPHLIQCLSDKKALVRSITCWTLSRYAHWVVSQPPDTYLKPLMTELLKRILDSNKRVQEAACSAFATLEEEACTELVPYLAYILDTLVFAFSKYQHKNLLILYDAIGTLADSVGHHLNKPEYIQMLMPPLIQKWNMLKDEDKDLFPLLECLSSVATALQSGFLPYCEPVYQRCVNLVQKTLAQAMLNNAQPDQYEAPDKDFMIVALDLLSGLAEGLGGNIEQLVARSNILTLMYQCMQDKMPEVRQSSFALLGDLTKACFQHVKPCIADFMPILGTNLNPEFISVCNNATWAIGEISIQMGIEMQPYIPMVLHQLVEIINRPNTPKTLLENTAITIGRLGYVCPQEVAPMLQQFIRPWCTSLRNIRDNEEKDSAFRGICTMISVNPSGVIQDFIFFCDAVASWINPKDDLRDMFCKILHGFKNQVGDENWRRFSDQFPLPLKERLAAFYGV

SEQ ID NO: 243 - protein, 253 aa, Homo sapiens
MANLGCWMLVLFVATWSDLGLCKKRPKPGGWNTGGSRYPGQGSPGGNRYPPQGGGGWGQPHGGGWGQPHGGGWGQPHGGGWGQPHGGGWGQGGGTHSQWNKPSKPKTNMKHMAGAAAAGAVVGGLGGYMLGSAMSRPIIHFGSDYEDRYYRENMHRYPNQVYYRPMDEYSNQNNFVHDCVNITIKQHTVTTTTKGENFTETDVKMMERVVEQMCITQYERESQAYYQRGSSMVLFSSPPVILLISFLIFLIVG

SEQ ID NO: 244 - protein, 980 aa, Homo sapiens
MKSLKAKFRKSDTNEWNKNDDRLLQAVENGDAEKVASLLGKKGASATKHDSEGKTAFHLAAAKGHVECLRVMITHGVDVTAQDTTGHSALHLAAKNSHHECIRRLLQSKCPAESVDSSGKTALHYAAAQGCLQAVQILCEHKSPINLKDLDGNIPLLLAVQNGHSEICHFLLDHGADVNSRNKSGRTALMLACEIGSSNAVEALIKKGADLNLVDSLGYNALHYSKLSENAGIQSLLLSKISQDADLKTPTKPKQHDQVSKISSERSGTPKTRKAPPPPISPTQLSDVSSPRSITSTPLSGKESVFFAEPPFKAEISSIRENKDRLSDSTTGADSLLDISSEADQQDLLSLLQAKVASLTLHNKELQDKLQAKSPKEAEADLSFDSYHSTQTDLGPSLGKPGETSPPDSKSSPSVLIHSLGKSTTDNDVRIQQLQEILQDLQKRLESSEAERKQLQVELQSRRAELVCLNNTEISENSSDLSQKLKETQSKYEEAMKEVLSVQKQMKLGLVSPESMDNYSHFHELRVTEEEINVLKQDLQNALEESERNKEKVRELEEKLVEREKGTVIKPPVEEYEEMKSSYCSVIENMNKEKAFLFEKYQEAQEEIMKLKDTLKSQMTQEASDEAEDMKEAMNRMIDELNKQVSELSQLYKEAQAELEDYRKRKSLEDVTAEYIHKAEHEKLMQLTNVSRAKAEDALSEMKSQYSKVLNELTQLKQLVDAQKENSVSITEHLQVITTLRTAAKEMEEKISNLKEHLASKEVEVAKLEKQLLEEKAAMTDAMVPRSSYEKLQSSLESEVSVLASKLKESVKEKEKVHSEVVQIRSEVSQVKREKENIQTLLKSKEQEVNELLQKFQQAQEELAEMKRYAESSSKLEEDKDKKINEMSKEVTKLKEALNSLSQLSYSTSSSKRQSQQLEALQQQVKQLQNQLAECKKQHQEVISVYRMHLLYAVQGQMDEDVQKVLKQILTMCKNQSQKK

SEQ ID NO: 245 - protein, 1218 aa, Homo sapiens; identical to SEQ ID NO: 169

SEQ ID NO: 246 - protein, 253 aa, Homo sapiens
MALSMPLNGLKEEDKEPLIELFVKAGSDGESIGNCPFSQRLFMILWLKGVVFSVTTVDLKRKPADLQNLAPGTHPPFITFNSEVKTDVNKIEEFLEEVLCPPKYLKLSPKHPESNTAGMDIFAKFSAYIKNSRPEANEALERGLLKTLQKLDEYLNSPLPDEIDENSMEDIKFSTRKFLDGNEMTLADCNLLPKLHIVKVVAKKYRNFDIPKEMTGIWRYLTNAYSRDEFTNTCPSDKEVEIAYSDVAKRLTK

SEQ ID NO: 247 - protein, 332 aa, Homo sapiens
MLAVHFDKPGGPENLYVKEVAKPSPGEGEVLLKVAASALNRADLMQRQGQYDPPPGASNILGLEASGHVAELGPGCQGHWKIGDTAMALLPGGGQAQYVTVPEGLLMPIPEGLTLTQAAAIPEAWLTAFQLLHLVGNVQAGDYVLIHAGLSGVGTAAIQLTRMAGAIPLVTAGSQKKLQMAEKLGAAAGFNYKKEDFSEATLKFTKGAGVNLILDCIGGSYWEKNVNCLALDGRWVLYGLMGGGDINGPLFSKLLFKRGSLITSLLRSRDNKYKQMLVNAFTEQILPHFSTEGPQRLLPVLDRIYPVTEIQEAHKYMEANKNIGKIVLELPQ

SEQ ID NO: 248 - protein, 534 aa, Homo sapiens
MGYSSGVTNGLNDASDSIYTKGTPEIAFWGSNAGVKTTRLEAHSEMGSTEILEKETPENLSNGTSSNVEAAKRLAKRLYQLDRFKRSDVAKHLGKNNEFSKLVAEEYLKFFDFTGMTLDQSLRYFFKAFSLVGETQERERVLIHFSNRYFYCNPDTIASQDGVHCLTCAIMLLNTDLHGHVNIGKKMTCQEFIANLQGVNEGVDFSKDLLKALYNSIKNEKLEWAVDDEEKKKSPSESTEEKANGTHPKTISRIGSTTNPFLDIPHDPNAAVYKSGFLARKIHADMDGKKTPRGKRGWKTFYAVLKGTVLYLQKDEYKPEKALSEEDLKNAVSVHHALASKATDYEKKPNVFKLKTADWRVLLFQTQSPEEMQGWINKINCVAAVFSAPPFPAAIGSQKKFSRPLLPATTTKLSQEEQLKSHESKLKQITTELAEHRSYPPDKKVKAKDVDEYKLKDHYLEFEKTRYEMYVSILKEGGKELLSNDESEAAGLKKSHSSPSLNPDTSPITAKVKRNVSERKDHRPETPSIKQKVT

SEQ ID NO: 249 - protein, 745 aa, Homo sapiens
MEVMNLMEQPIKVTEWQQTYTYDSGIHSGANTCVPSVSSKGIMEEDEACGRQYTLKKTTTYTQGVPPSQGDLEYQMSTTARAKRVREAMCPGVSGEDSSLLLATQVEGQATNLQRLAEPSQLLKSAIVHLINYQDDAELATRALPELTKLLNDEDPVVVTKAAMIVNQLSKKEASRRALMGSPQLVAAVVRTMQNTSDLDTARCTTSILHNLSHHREGLLAIFKSGGIPALVRMLSSPVESVLFYAITTLHNLLLYQEGAKMAVRLADGLQKMVPLLNKNNPKFLAITTDCLQLLAYGNQESKLIILANGGPQALVQIMRNYSYEKLLWTTSRVLKVLSVCPSNKPAIVEAGGMQALGKHLTSNSPRLVQNCLWTLRNLSDVATKQEGLESVLKILVNQLSVDDVNVLTCATGTLSNLTCNNSKNKTLVTQNSGVEALIHAILRAGDKDDITEPAVCALRHLTSRHPEAEMAQNSVRLNYGIPAIVKLLNQPNQWPLVKATIGLIRNLALCPANHAPLQEAAVIPRLVQLLVKAHQDAQRHVAAGTQQPYTDGVRMEEIVEGCTGALHILARDPMNRMEIFRLNTIPLFVQLLYSSVENIQRVAAGVLCELAQDKEAADAIDAEGASAPLMELLHSRNEGTATYAAAVLFRISEDKNPDYRKRVSVELTNSLFKHDPAAWEAAQSMIPINEPYGDDMDATYRPMYSSDVPLDPLEMHMDMDGDYPIDTYSDGLRPPYPTADHMLA

SEQ ID NO: 250 - protein, 614 aa, Homo sapiens; identical to SEQ ID NO: 168

SEQ ID NO: 251 - protein, 350 aa, Homo sapiens
MQRLGATLLCLLLAAAVPTAPAPAPTATSAPVKPGPALSYPQEEATLNEMFREVEELMEDTQHKLRSAVEEMEAEEAAAKASSEVNLANLPPSYHNETNTDTKVGNNTIHVHREIHKITNNQTGQMVFSETVITSVGDEEGRRSHECIIDEDCGPSMYCQFASFQYTCQPCRGQRMLCTRDSECCGDQLCVWGHCTKMATRGSNGTICDNQRDCQPGLCCAFQRGLLFPVCTPLPVEGELCHDPASRLLDLITWELEPDGALDRCPCASGLLCQPHSHSLVYVCKPTFVGSRDQDGEILLPREVPDEYEVGSFMEEVRQELEDLERSLTEEMALGEPAAAAAALLGGEEI

SEQ ID NO: 252 - protein, 1218 aa, Homo sapiens; identical to SEQ ID NO: 169

SEQ ID NO: 253 - protein, 538 aa, Homo sapiens
MDDFERRRELRRQKREEMRLEAERIAYQRNDDDEEEAARERRRRARQERLRQKQEEESLGQVTDQVEVNAQNSVPDEEAKTTTTNTQVEGDDEAAFLERLARREERRQKRLQEALERQKEFDPTITDASLSLPSRRMQNDTAENETTEKEEKSESRQERYEIEETETVTKSYQKNDWRDAEENKKEDKEKEEEEEEKPKRGSIGENQIKDEKIKKDKEPKEEVKSFMDRKKGFTEVKSQNGEFMTHKLKHTENTFSRPGGRASVDTKEAEGAPQVEAGKRLEELRRRRGETESEEFEKLKQKQQEAALELEELKKKREERRKVLEEEEQRRKQEEADRKLREEEEKRRLKEEIERRRAEAAEKRQKMPEDGLSDDKKPFKCFTPKGSSLKIEERAEFLNKSVQKSSGVKSTHQAAIVSKIDSRLEQYTSAIEGTKSAKPTKPAASDLPVPAEGVRNIKSMWEKGNVFSSPTAAGTPNKETAGLKVGVSSRINEWLTKTPDGNKSPAPKPSDLRPGDVSSKRNLWEKQSVDKVTSPTKV

SEQ ID NO: 254 - protein, 570 aa, Homo sapiens
MSYQGKKNIPRITSDRLLIKGGRIVNDDQSFYADIYMEDGLIKQIGDNLIVPGGVKTIEANGKMVIPGGIDVHTHFQMPYKGMTTVDDFFQGTKAALAGGTTMIIDHVVPEPESSLTEAYEKWREWADGKSCCDYALHVDITHWNDSVKQEVQNLIKDKGVNSFMVYMAYKDLYQVSNTELYEIFTCLGELGAIAQVHAENGDIIAQEQTRMLEMGITGPEGHVLSRPEELEAEAVFRAITIASQTNCPLYVTKVMSKSAADLISQARKKGNVVFGEPITASLGIDGTHYWSKNWAKAAAFVTSPPLSPDPTTPDYINSLLASGDLQLSGSAHCTFSTAQKAIGKDNFTAIPEGTNGVEERMSVIWDKAVATGKMDENQFVAVTSTNAAKIFNLYPRKGRISVGSDSDLVIWDPDAVKIVSAKNHQSAAEYNIFEGMELRGAPLVVICQGKIMLEDGNLHVTQGAGRFIPCSPFSDYVYKRIKARRKMADLHAVPRGMYDGPVFDLTTTPKGGTPAGSARGSPTRPNPPVRNLHQSGFSLSGTQVDEGVRSASKRIVAPPGGRSNITSLS

SEQ ID NO: 255 - protein, 160 aa, Homo sapiens
MLLLLLSIIVLHVAVLVLLFVSTIVSQWIVGNGHATDLWQNCSTSSSGNVHHCFSSSPNEWLQSVQATMILSIIFSILSLFLFFCQLFTLTKGGRFYITGIFQILAGLCVMSAAAIYTVRHPEWHLNSDYSYGFAYILAWVAFPLALLSGVIYVILRKRE

SEQ ID NO: 256 - protein, 583 aa, Homo sapiens; identical to SEQ ID NO: 179

SEQ ID NO: 257 - protein, 614 aa, Homo sapiens; identical to SEQ ID NO: 168

SEQ ID NO: 258 - protein, 890 aa, Homo sapiens; identical to SEQ ID NO: 242

SEQ ID NO: 259 - protein, 700 aa, Homo sapiens
MEPLCPLLLVGFSLPLARALRGNETTADSNETTTTSGPPDPGASQPLLAWLLLPLLLLLLVLLLAAYFFRFRKQRKAVVSTSDKKMPNGILEEQEQQRVMLLSRSPSGPKKYFPIPVEHLEEEIRIRSADDCKQFREEFNSLPSGHIQGTFELANKEENREKNRYPNILPNDHSRVILSQLDGIPCSDYINASYIDGYKEKNKFIAAQGPKQETVNDFWRMVWEQKSATIVMLTNLKERKEEKCHQYWPDQGCWTYGNIRVCVEDCVVLVDYTIRKFCIQPQLPDGCKAPRLVSQLHFTSWPDFGVPFTPIGMLKFLKKVKTLNPVHAGPIVVHCSAGVGRTGTFIVIDAMMAMMHAEQKVDVFEFVSRIRNQRPQMVQTDMQYTFIYQALLEYYLYGDTELDVSSLEKHLQTMHGTTTHFDKIGLEEEFRKLTNVRIMKENMRTGNLPANMKKARVIQIIPYDFNRVILSMKRGQEYTDYINASFIDGYRQKDYFIATQGPLAHTVEDFWRMIWEWKSHTIVMLTEVQEREQDKCYQYWPTEGSVTHGEITIEIKNDTLSEAISIRDFLVTLNQPQARQEEQVRVVRQFHFHGWPEIGIPAEGKGMIDLIAAVQKQQQQTGNHPITVHCSAGAGRTGTFIALSNILERVKAEGLLDVFQAVKSLRLQRPHMVQTLEQYEFCYKVVQDFIDIFSDYANFK

SEQ ID NO: 260 - protein, 343 aa, Homo sapiens
MNIHRSTPITIARYGRSRNKTQDFEELSSIRSAEPSQSFSPNLGSPSPPETPNLSHCVSCIGKYLLLEPLEGDHVFRAVHLHSGEELVCKVFDISCYQESLAPCFCLSAHSNINQITEIILGETKAYVFFERSYGDMHSFVRTCKKLREEEAARLFYQIASAVAHCHDGGLVLRDLKLRKFIFKDEERTRVKLESLEDAYILRGDDDSLSDKHGCPAYVSPEILNTSGSYSGKAADVWSLGVMLYTMLVGRYPFHDIEPSSLFSKIRRGQFNIPETLSPKAKCLIRSILRREPSERLTSQEILDHPWFSTDFSVSNSAYGAKEVSDQLVPDVNMEENLDPFFN

SEQ ID NO: 261 - protein, 717 aa, Homo sapiens
MVAERTHKAAATGARGPGELGAPGTVALVAARAERGARLPSPGSCGLLTLALCSLALSLLAHFRTAELQARVLRLEAERGEQQMETAILGRVNQLLDEKWKLHSRRRREAPKTSPGCNCPPAFQGPTGRPGLPGDKGAIGMPGRVGSPGDAGLSIIGPRGPPGQPGTRGFPGFPGPIGLDGKPGHPGPKGDMGLTGPPGQPGPQGQKGEKGQCGEYPHRECLSSMPAALRSSQIIALKLLPLLNSVRLAPPPVIKRRTFQGEQSQASIQGPPGPPGPPGPSGPLGHPGLPGPMGPPGLPGPPGPKGDPGIQGYHGRKGERGMPGMPGKHGAKGAPGIAVAGMKGEPGIPGTKGEKGAEGSPGLPGLLGQKGEKGDAGNSIGGGRGEPGPPGLPGPPGPKGEAGVDGQVGPPGQPGDKGERGAAGEQGPDGPKGSKGEPGKGEMVDYNGNINEALQEIRTLALMGPPGLPGQIGPPGAPGIPGQKGEIGLPGPPGHDGEKGPRGKPGDMGPPGPQGPPGKDGPPGVKGENGHPGSPGEKGEKGETGQAGSPGEKGEAGEKGNPGAEVPGLPGPEGPPGPPGLQGVPGPKGEAGLDGAKGEKGFQGEKGDRGPLGLPGASGLDGRPGPPGTPGPIGVPGPAGPKGERGSKGDPGMTGPTGAAGLPGLHGPPGDKGNRGERGKKGSRGPKGDKGDQGAPGLDAPCPLGEDGLPVQGCWNK

SEQ ID NO: 262 - protein, 411 aa, Homo sapiens
MAEAELHKERLQAIAEKRKRQTEIEGKRQQLDEQILLLQHSKSKVLREKWLLQGIPAGTAEEEEARRRQSEEDEFRVKQLEDNIQRLEQEIQTLESEESQISAKEQIILEKLKETEKSFKDFQKGFSSTDGDAVNYISSQLPDLPILCSRTAEPSPGQDGTSRAAAVYAMEINVEKDKQTGETKILSTSTIGPEGVHQKGVKVYDDGTKVVYEVRSGGTVVENGVHKLSTKDVEELIQKAGQSSLGGGHVSERTVIADGSLSHPKEHMLCKEAKLEMVHKSRKDHSSGNPGQQAQAPSAAGPEANLDQPVTMIFMGYQNIEDEEETKKVLGYDETIKAELVLIDEDDEKSLREKTVTDVSTIDGNAAELVSGRPVSDTTEPSSPEGKEESLATEPAPGTQKKKRCQCCVVM

SEQ ID NO: 263 - protein, 382 aa, Homo sapiens
MGDWSALGKLLDKVQAYSTAGGKVWLSVLFIFRILLLGTAVESAWGDEQSAFRCNTQQPGCENVCYDKSFPISHVRFWVLQIIFVSVPTLLYLAHVFYVMRKEEKLNKKEEELKVAQTDGVNVDMHLKQIEIKKFKYGIEEHGKVKMRGGLLRTYIISILFKSIFEVAFLLIQWYIYGFSLSAVYTCKRDPCPHQVDCFLSRPTEKTIFIIFMLVVSLVSLALNIIELFYVFFKGVKDRVKGKSDPYHATSGALSPAKDCGSQKYAYFNGCSSPTAPLSPMSPPGYKLVTGDRNNSSCRNYNKQASEQNWANYSAEQNRMGQAGSTISNSHAQPFDFPDDNQNSKKLAAGHELQPLAIVDQRPSSRASSRASSRPRPDDLEI

SEQ ID NO: 264 - protein, 663 aa, Homo sapiens
MLQMPKLNEIPPGRAGRREARGEGRWPGQTGPEAARLEWRAQGQAGGARAPWDSWGSSRLPTQPGPGWSRCPPSLLCALSFQKSTMESKDEVSDTDSGIILQSGPDSPVSPMKELTHAVHKQQRALEARLEACLEELRRLCLREAELTGTLPAEYPLKPGEKAPKVRRRIGAAYKLDDWALHREDPLSSLERQLALQLQITEAARRLCLEENLSRQARRQRKHSMLQEEKKLQELQRCLVERRRNSEPPPAAALPLGRELSASDDSSLSDGLLLEEEESQVPKPPPESPAPPSRPLPPQTLEGLQPTGPEAGSPERAPVQNSPWKETSLDHPYEKPRKSSEPWSESSSPATTPQDGPSASSLWLLEPASYHVVPIRGVPGQWQGRTSAPATPEIQGRRGQSQSLRVDSFRAGPEGRGRSAFPRRRPTHYTVTVPDSCFPATKPPLPHAACHSCSEDSGSDVSSISHPTSPGSSSPDISFLQPLSPPKTHRHRGAWVPAGSRELVAHHPKLLLPPGYFPAGRYVVVAESPLPPGEWELCRAAPGPAYEEEGTPLRYQRLVPSRSRIVRTPSLKDSPAGRGLSKAAVSEELKWWHERARLRSTRPHSLDRQGAFRVRSLPLGREGFGRALGPRAQVPTVCVLWRSPDGAPVQVFVPEKGEIISQV

SEQ ID NO: 265 - protein, 493 aa, Homo sapiens
MLKALFLTMLTLALVKSQDTEETITYTQCTDGYEWDPVRQQCKDIDECDIVPDACKGGMKCVNHYGGYLCLPKTAQIIVNNEQPQQETQPAEGTSGATTGVVAASSMATSGVLPGGGFVASAAAVAGPEMQTGRNNFVIRRNPADPQRIPSNPSHRIQCAAGYEQSEHNVCQDIDECTAGTHNCRADQVCINLRGSFACQCPPGYQKRGEQCVDIDECTIPPYCHQRCVNTPGSFYCQCSPGFQLAANNYTCVDINECDASNQCAQQCYNILGSFICQCNQGYELSSDRLNCEDIDECRTSSYLCQYQCVNEPGKFSCMCPQGYQVVRSRTCQDINECETTNECREDEMCWNYHGGFRCYPRNPCQDPYILTPENRCVCPVSNAMCRELPQSIVYKYMSIRSDRSVPSDIFQIQATTIYANTINTFRIKSGNENGEFYLRQTSPVSAMLVLVKSLSGPREHIVDLEMLTVSSIGTFRTSSVLRLTIIVGPFSF

SEQ ID NO: 266 - protein, 923 aa, Homo sapiens
MERGLPLLCAVLALVLAPAGAFRNDKCGDTIKIESPGYLTSPGYPHSYHPSEKCEWLIQAPDPYQRIMINFNPHFDLEDRDCKYDYVEVFDGENENGHFRGKFCGKIAPPPVVSSGPFLFIKFVSDYETHGAGFSIRYEIFKRGPECSQNYTTPSGVIKSPGFPEKYPNSLECTYIVFAPKMSEIILEFESFDLEPDSNPPGGMFCRYDRLEIWDGFPGVGPHIGRYCGQKTPGRIRSSSGILSMVFYTDSAIAKEGFSANYSVLQSSVSEDFKCMEALGMESGEIHSDQITASSQYSTNWSAERSRLNYPENGWTPGEDSYREWIQVDLGLLRFVTAVGTQGAISKETKKKYYVKTYKIDVSSNGEDWITIKEGNKPVLFQGNTNPTDVVVAVFPKPLITRFVRIKPATWETGISMRFEVYGCKITDYPCSGMLGMVSGLISDSQITSSNQGDRNWMPENIRLVTSRSGWALPPAPHSYINEWLQIDLGEEKIVRGIIIQGGKHRENKVFMRKFKIGYSNNGSDWKMIMDDSKRKAKSFEGNNNYDTPELRTFPALSTRFIRIYPERATHGGLGLRMELLGCEVEAPTAGPTTPNGNLVDECDDDQANCHSGTGDDFQLTGGTTVLATEKPTVIDSTIQSEFPTYGFNCEFGWGSHKTFCHWEHDNHVQLKWSVLTSKTGPIQDHTGDGNFIYSQADENQKGKVARLVSPVVYSQNSAHCMTFWYHMSGSHVGTLRVKLRYQKPEEYDQLVWMAIGHQGDHWKEGRVLLHKSLKLYQVIFEGEIGKGNLGGIAVDDISINNHISQEDCAKPADLDKKNPEIKIDETGSTPGYEGEGEGDKNISRKPGNVLKTLDPILITIIAMSALGVLLGAVCGVVLYCACWHNGMSERNLSALENYNFELVDGVKLKKDKLNTQSTYSEA

SEQ ID NO: 267 - protein, 211 aa, Homo sapiens
MANSGLQLLGFSMALLGWVGLVACTAIPQWQMSSYAGDNIITAQAMYKGLWMDCVTQSTGMMSCKMYDSVLALSAALQATRALMVVSLVLGFLAMFVATMGMKCTRCGGDDKVKKARIAMGGGIIFIVAGLATLVACSWYGHQIVTDFYNPLIPTNIKYEFGPAIFIGWAGSALVILGGALLSCSCPGNESKAGYRAPRSYPKSNSSKEYV

SEQ ID NO: 268 - protein, 304 aa, Homo sapiens
MNRAFSRKKDKTWMHTPEALSKHFIPYNAKFLGSTEVEQPKGTEVVRDAVRKLKFARHIKKSEGQKIPKVELQISIYGVKILEPKTKEVQHNCQLHRISFCADDKTDKRIFTFICKDSESNKHLCYVFDSEKCAEEITLTIGQAFDLAYRKFLESGGKDVETRKQIAGLQKRIQDLETENMELKNKVQDLENQLRITQVSAPPAGSMTPKSPSTDIFDMIPFSPISHQSSMPTRNGTQPPPVPSRSTEIKRDLFGAEPFDPFNCGAADFPPDIQSKLDEMQEGFKMGLTLEGTVFCLDPLDSRC

SEQ ID NO: 269 - protein, 3396 aa, Homo sapiens; identical to SEQ ID NO: 192

SEQ ID NO: 270 - protein, 890 aa, Homo sapiens; identical to SEQ ID NO: 242

SEQ ID NO: 271 - protein, 708 aa, Homo sapiens
MRERIWAPPLLLLLPLLLPPPLWGGPPDSPRRELELEPGPLQPFDLLYASGAAAYYSGDYERAVRDLEAALRSHRRLREIRTRCARHCAARHPLPPPPPGEGPGAELPLFRSLLGRARCYRSCETQRLGGPASRHRVSEDVRSDFQRRVPYNYLQRAYIKLNQLEKAVEAAHTFFVANPEHMEMQQNIENYRATAGVEALQLVDREAKPHMESYNAGVKHYEADDFEMAIRHFEQALREYFVEDTECRTLCEGPQRFEEYEYLGYKAGLYEAIADHYMQVLVCQHECVRELATRPGRLSPIENFLPLHYDYLQFAYYRVGEYVKALECAKAYLLCHPDDEDVLDNVDYYESLLDDSIDPASIEAREDLTMFVKRHKLESELIKSAAEGLGFSYTEPNYWIRYGGRQDENRVPSGVNVEGAEVHGFSMGKKLSPKIDRDLREGGPLLYENITFVYNSEQLNGTQRVLLDNVLSEEQCRELHSVASGIMLVGDGYRGKTSPHTPNEKFEGATVLKALKSGYEGRVPLKSARLFYDISEKARRIVESYFMLNSTLYFSYTHMVCRTALSGQQDRRNDLSHPIHADNCLLDPEANECWKEPPAYTFRDYSALLYMNDDFEGGEFIFTEMDAKTVTASIKPKCGRMISFSSGGENPHGVKAVTKGKRCAVALWFTLDPLYRELERIQADEVIAILDQEQQGKHELNINPKDEL

SEQ ID NO: 272 - protein, 284 aa, Homo sapiens
MDAIKKKMQMLKLDKENALDRAEQAEADKKAAEDRSKQLEDELVSLQKKLKGTEDELDKYSEALKDAQEKLELAEKKATDAEADVASLNRRIQLVEEELDRAQERLATALQKLEEAEKAADESERGMKVIESRAQKDEEKMEIQEIQLKEAKHIAEDADRKYEEVARKLVIIESDLERAEERAELSEGQVRQLEEQLRIMDQTLKALMAAEDKYSQKEDRYEEEIKVLSDKLKEAETRAEFAERSVTKLEKSIDDLEDELYAQKLKYKAISEELDHALNDMTSM

SEQ ID NO: 273 - protein, 160 aa, Homo sapiens
MLPFLFFSTLFSSIFTEAQKQYWVCNSSDASISYTYCDKMQYPISINVNPCIELKGSKGLLHIFYIPRRDLKQLYFNLYITVNTMNLPKRKEVICRGSDDDYSFCRALKGETVNTTISFSFKGIKFSKGKYKCVVEAISGSPEEMLFCLEFVILHQPNSN

SEQ ID NO: 274 - protein, 1028 aa, Homo sapiens; identical to SEQ ID NO: 166

SEQ ID NO: 275 - protein, 254 aa, Homo sapiens
MPAKTPIYLKAANNKKGKKFKLRDILSPDMISPPLGDFRHTIHIGKEGQHDVFGDISFLQGNYELLPGNQEKAHLGQFPGHNEFFRANSTSDSVFTETPSPVLKNAISLPTIGGSQALMLPLLSPVTFNSKQESFGPAKLPRLSCEPVMEEKAQEKSSLLENGTVHQGDTSWGSSGSASQSSQGRDSHSSSLSEQYPDWPAEDMFDHPTPCELIKGKTKSEESLSDLTGSLLFLQLDLGPSLLDEVLNVMDKNK

SEQ ID NO: 276 - protein, 146 aa, Homo sapiens; identical to SEQ ID NO: 149

SEQ ID NO: 277 - protein, 906 aa, Homo sapiens
MCRIAGALRTLLPLLAALLQASVEASGEIALCKTGFPEDVYSAVLSKDVHEGQPLLNVKFSNCNGKRKVQYESSEPADFKVDEDGMVYAVRSFPLSSEHAKFLIYAQDKETQEKWQVAVKLSLKPTLTEESVKESAEVEEIVFPRQFSKHSGHLQRQKRDWVIPPINLPENSRGPFPQELVRIRSDRDKNLSLRYSVTGPGADQPPTGIFIINPISGQLSVTKPLDREQIARFHLRAHAVDINGNQVENPIDIVINVIDMNDNRPEFLHQVWNGTVPEGSKPGTYVMTVTAIDADDPNALNGMLRYRIVSQAPSTPSPNMFTINNETGDIITVAAGLDREKVQQYTLIIQATDMEGNPTYGLSNTATAVITVTDVNDNPPEFTAMTFYGEVPENRVDIIVANLTVTDKDQPHTPAWNAVYRISGGDPTGRFAIQTDPNSNDGLVTVVKPIDFETNRMFVLTVAAENQVPLAKGIQHPPQSTATVSVTVIDVNENPYFAPNPKIIRQEEGLHAGTMLTTFTAQDPDRYMQQNIRYTKLSDPANWLKIDPVNGQITTIAVLDRESPNVKNNIYNATFLASDNGIPPMSGTGTLQIYLLDINDNAPQVLPQEAETCETPDPNSINITALDYDIDPNAGPFAFDLPLSPVTIKRNWTITRLNGDFAQLNLKIKFLEAGIYEVPIIITDSGNPPKSNISILRVKVCQCDSNGDCTDVDRIVGAGLGTGAIIAILLCIIILLILVLMFVVWMKRRDKERQAKQLLIDPEDDVRDNILKYDEEGGGEEDQDYDLSQLQQPDTVEPDAIKPVGIRRMDERPIHAEPQYPVRSAAPHPGDIGDFINEGLKAADNDPTAPPYDSLLVFDYEGSGSTAGSLSSLNSSSSGGEQDYDYLNDWGPRFKKLADMYGGGDD

SEQ ID NO: 278 - protein, 991 aa, Homo sapiens
MDFRANLQRQVKPKTVSEEERKVHSPQQVDFRSVLAKKGTSKTPVPEKVPPPKPATPDFRSVLGGKKKLPAENGSSSAETLNAKAVESSKPLSNAQPSGPLKPVGNAKPAETLKPMGNAKPAETLKPMGNAKPDENLKSASKEELKKDVKNDVNCKRGHAGTTDNEKRSESQGTAPAFKQKLQDVHVAEGKKLLLQCQVSSDPPATIIWTLNGKTLKTTKFIILSQEGSLCSVSIEKALPEDRGLYKCVAKNDAGQAECSCQVTVDDAPASENTKAPEMKSRRPKSSLPPVLGTESDATVKKKPAPKTPPKAAMPPQIIQFPEDQKVRAGESVELFGKVTGTQPITCTWMKFRKQIQESEHMKVENSENGSKLTILAARQEHCGCYTLLVENKLGSRQAQVNLTVVDKPDPPAGTPCASDIRSSSLTLSWYGSSYDGGSAVQSYSIEIWDSANKTWKELATCRSTSFNVQDLLPDHEYKFRVRAINVYGTSEPSQESELTTVGEKPEEPKDEVEVSDDDEKEPEVDYRTVTINTEQKVSDFYDIEERLGSGKFGQVFRLVEKKTRKVWAGKFFKAYSAKEKENIRQEISIMNCLHHPKLVQCVDAFEEKANIVMVLEIVSGGELFERIIDEDFELTERECIKYMRQISEGVEYIHKQGIVHLDLKPENIMCVNKTGTRIKLIDFGLARRLENAGSLKVLFGTPEFVAPEVINYEPIGYATDMWSIGVICYILVSGLSPFMGDNDNETLANVTSATWDFDDEAFDEISDDAKDFISNLLKKDMKNRLDCTQCLQHPWLMKDTKNMEAKKLSKDRMKKYMARRKWQKTGNAVRAIGRLSSMAMISGLSGRKSSTGSPTSPLNAEKLESEDVSQAFLEAVAEEKPHVKPYFSKTIRDLEVVEGSAARFDCKIEGYPDPEVVWFKDDQSIRESRHFQIDYDEDGNCSLIISDVCGDDDAKYTCKAVNSLGEATCTAELIVETMEEGEGEGEEEEE

SEQ ID NO: 279 - protein, 1669 aa, Homo sapiens
MGPRLSVWLLLLPAALLLHEEHSRAAAKGGCAGSGCGKCDCHGVKGQKGERGLPGLQGVIGFPGMQGPEGPQGPPGQKGDTGEPGLPGTKGTRGPPGASGYPGNPGLPGIPGQDGPPGPPGIPGCNGTKGERGPLGPPGLPGFAGNPGPPGLPGMKGDPGEILGHVPGMLLKGERGFPGIPGTPGPPGLPGLQGPVGPPGFTGPPGPPGPPGPPGEKGQMGLSFQGPKGDKGDQGVSGPPGVPGQAQVQEKGDFATKGEKGQKGEPGFQGMPGVGEKGEPGKPGPRGKPGKDGDKGEKGSPGFPGEPGYPGLIGRQGPQGEKGEAGPPGPPGIVIGTGPLGEKGERGYPGTPGPRGEPGPKGFPGLPGQPGPPGLPVPGQAGAPGFPGERGEKGDRGFPGTSLPGPSGRDGLPGPPGSPGPPGQPGYTNGIVECQPGPPGDQGPPGIPGQPGFIGEIGEKGQKGESCLICDIDGYRGPPGPQGPPGEIGFPGQPGAKGDRGLPGRDGVAGVPGPQGTPGLIGQPGAKGEPGEFYFDLRLKGDKGDPGFPGQPGMPGRAGSPGRDGHPGLPGPKGSPGSVGLKGERGPPGGVGFPGSRGDTGPPGPPGYGPAGPIGDKGQAGFPGGPGSPGLPGPKGEPGKIVPLPGPPGAEGLPGSPGFPGPQGDRGFPGTPGRPGLPGEKGAVGQPGIGFPGPPGPKGVDGLPGDMGPPGTPGRPGFNGLPGNPGVQGQKGEPGVGLPGLKGLPGLPGIPGTPGEKGSIGVPGVPGEHGAIGPPGLQGIRGEPGPPGLPGSVGSPGVPGIGPPGARGPPGGQGPPGLSGPPGIKGEKGFPGFPGLDMPGPKGDKGAQGLPGITGQSGLPGLPGQQGAPGIPGFPGSKGEMGVMGTPGQPGSPGPVGAPGLPGEKGDHGFPGSSGPRGDPGLKGDKGDVGLPGKPGSMDKVDMGSMKGQKGDQGEKGQIGPIGEKGSRGDPGTPGVPGKDGQAGQPGQPGPKGDPGISGTPGAPGLPGPKGSVGGMGLPGTPGEKGVPGIPGPQGSPGLPGDKGAKGEKGQAGPPGIGIPGLRGEKGDQGIAGFPGSPGEKGEKGSIGIPGMPGSPGLKGSPGSVGYPGSPGLPGEKGDKGLPGLDGIPGVKGEAGLPGTPGPTGPAGQKGEPGSDGIPGSAGEKGEPGLPGRGFPGFPGAKGDKGSKGEVGFPGLAGSPGIPGSKGEQGFMGPPGPQGQPGLPGSPGHATEGPKGDRGPQGQPGLPGLPGPMGPPGLPGIDGVKGDKGNPGWPGAPGVPGPKGDPGFQGMPGIGGSPGITGSKGDMGPPGVPGFQGPKGLPGLQGIKGDQGDQGVPGAKGLPGPPGPPGPYDIIKGEPGLPGPEGPPGLKGLQGLPGPKGQQGVTGLVGIPGPPGIPGFDGAPGQKGEMGPAGPTGPRGFPGPPGPDGLPGSMGPPGTPSVDHGFLVTRHSQTIDDPQCPSGTKILYHGYSLLYVQGNERAHGQDLGTAGSCLRKFSTMPFLFCNINNVCNFASRNDYSYWLSTPEPMPMSMAPITGENIRPFISRCAVCEAPAMVMAVHSQTIQIPPCPSGWSSLWIGYSFVMHTSAGAEGSGQALASPGSCLEEFRSAPFIECHGRGTCNYYANAYSFWLATIERSEMFKKPTPSTLKAGELRTHVSRCQVCMRRT

SEQ ID NO: 280 - protein, 676 aa, Homo sapiens
MRVLGGRCGAPLACLLLVLPVSEANLLSKQQASQVLVRKRRANSLLEETKQGNLERECIEELCNKEEAREVFENDPETDYFYPKYLVCLRSFQTGLFTAARQSTNAYPDLRSCVNAIPDQCSPLPCNEDGYMSCKDGKASFTCTCKPGWQGEKCEFDINECKDPSNINGGCSQICDNTPGSYHCSCKNGFVMLSNKKDCKDVDECSLKPSICGTAVCKNIPGDFECECPEGYRYNLKSKSCEDIDECSENMCAQLCVNYPGGYTCYCDGKKGFKLAQDQKSCEVVSVCLPLNLDTKYELLYLAEQFAGVVLYLKFRLPEISRFSAEFDFRTYDSEGVILYAESIDHSAWLLIALRGGKIEVQLKNEHTSKITTGGDVINNGLWNMVSVEELEHSISIKIAKEAVMDINKPGPLFKPENGLLETKVYFAGFPRKVESELIKPINPRLDGCIRSWNLMKQGASGIKEIIQEKQNKHCLVTVEKGSYYPGSGIAQFHIDYNNVSSAEGWHVNVTLNIRPSTGTGVMLALVSGNNTVPFAVSLVDSTSEKSQDILLSVENTVIYRIQALSLCSDQQSHLEFRVNRNNLELSTPLKIETISHEDLQRQLAVLDKAMKAKVATYLGGLPDVPFSATPVNAFYNGCMEVNINGVQLDLDEAISKHNDIRAHSCPSVWKKTKNS

SEQ ID NO: 281 - protein, 493 aa, Homo sapiens; identical to SEQ ID NO: 265

SEQ ID NO: 282 - protein, 99 aa, Homo sapiens
MKVSAALLCLLLIAATFIPQGLAQPDAINAPVTCCYNFTNRKISVQRLASYRRITSSKCPKEAVIFKTIVAKEICADPKQKWVQDSMDHLDKQTQTPKT

SEQ ID NO: 283 - protein, 496 aa, Homo sapiens
MFAKATRNFLREVDADGDLIAVSNLNDSDKLQLLSLVTKKKRFWCWQRPKYQFLSLTLGDVLIEDQFPSPVVVESDFVKYEGKFANHVSGTLETALGKVKLNLGGSSRVESQSSFGTLRKQEVDLQQLIRDSAERTINLRNPVLQQVLEGRNEVLCVLTQKITTMQKCVISEHMQVEEKCGGIVGIQTKTVQVSATEDGNVTKDSNVVLEIPAATTIAYGVIELYVKLDGQFEFCLLRGKQGGFENKKRIDSVYLDPLVFREFAFIDMPDAAHGISSQDGPLSVLKQATLLLERNFHPFAELPEPQQTALSDIFQAVLFDDELLMVLEPVCDDLVSGLSPTVAVLGELKPRQQQDLVAFLQLVGCSLQGGCPGPEDAGSKQLFMTAYFLVSALAEMPDSAAALLGTCCKLQIIPTLCHLLRALSDDGVSDLEDPTLTPLKDTERFGIVQRLFASADISLERLKSSVKAVILKDSKVFPLLLCITLNGLCALGREHS

SEQ ID NO: 284 - protein, 284 aa, Homo sapiens; identical to SEQ ID NO: 272

SEQ ID NO: 285 - protein, 285 aa, Homo sapiens
MAGLGHPAAFGRATHAVVRALPESLGQHALRSAKGEEVDVARAERQHQLYVGVLGSKLGLQVVELPADESLPDCVFVEDVAVVCEETALITRPGAPSRRKEVDMMKEALEKLQLNIVEMKDENATLDGGDVLFTGREFFVGLSKRTNQRGAEILADTFKDYAVSTVPVADGLHLKSFCSMAGPNLIAIGSSESAQKALKIMQQMSDHRYDKLTVPDDIAANCIYLNIPNKGHVLLHRTPEEYPESAKVYEKLKDHMLIPVSMSELEKVDGLLTCCSVLINKKVDS

SEQ ID NO: 286 - protein, 54 aa, Homo sapiens
MPGKKARKNAQPSPARAPAELEVECATQLRRFGDKLNFRQKLLNLISKLFCSGT

SEQ ID NO: 287 - protein, 681 aa, Homo sapiens
MGSPVHRVSLGDTWSRQMHPDIESERYMQSFDVERLTNILDGGAQNTALRRKVESIIHSYPEFSCKDNYFMTQNERYKAAMRRAFHIRLIARRLGWLEDGRELGYAYRALSGDVALNIHRVFVRALRSLGSEEQIAKWDPLCKNIQIIATYAQTELGHGTYLQGLETEATYDAATQEFVIHSPTLTATKWWPGDLGRSATHALVQAQLICSGARRGMHAFIVPIRSLQDHTPLPGIIIGDIGPKMDFDQTDNGFLQLNHVRVPRENMLSRFAQVLPDGTYVKLGTAQSNYLPMVVVRVELLSGEILPILQKACVIAMRYSVIRRQSRLRPSDPEAKVLDYQTQQQKLFPQLAISYAFHFLAVSLLEFFQHSYTAILNQDFSFLPELHALSTGMKAMMSEFCTQGAEMCRRACGGHGYSKLSGLPSLVTKLSASCTYEGENTVLYLQVARFLVKSYLQTQMSPGSTPQRSLSPSVAYLTAPDLARCPAQRAADFLCPELYTTAWAHVAVRLIKDSVQHLQTLTQSGADQHEAWNQTTVIHLQAAKVHCYYVTVKGFTEALEKLENEPAIQQVLKRLCDLHAIHGILTNSGDFLHDAFLSGAQVDMARTAYLDLLRLIRKDAILLTDAFDFTDQCLNSALGCYDGNVYERLFQWAQKSPTNTQENPAYEEYIRPLLQSWRSKL

SEQ ID NO: 288 - protein, 447 aa, Homo sapiens [sequence omitted]

SEQ ID NO: 289 - protein, 570 aa, Homo sapiens; identical to SEQ ID NO: 254

SEQ ID NO: 290 - protein, 83 aa, Homo sapiens
MRLFLSLPVLVVVLSIVLEGPAPAQGTPDVSSALDKLKEFGNTLEDKARELISRIKQSELSAKMREWFSETFQKVKEKLKIDS

SEQ ID NO: 291 - protein, 2025 aa, Homo sapiens
MDNFAEGDFTVADYALLEDCPHVDDCVFAAEFMSNDYVRVTQLYCDGVGVQYKDYIQSERNLEFDICSIWCSKPISVLQDYCDAIKINIFWPLLFQHQNSSVISRLHPCVDANNSRASEINLKKLQHLELMEDIVDLAKKVANDSFLIGGLLRIGCKIENKILAMEEALNWIKYAGDVTILTKLGSIDNCWPMLSIFFTEYKYHITKIVMEDCNLLEELKTQSCMDCIEEGELMKMKGNEEFSKERFDIAIIYYTRAIEYRPENYLLYGNRALCFLRTGQFRNALGDGKRATILKNTWPKGHYRYCDALSMLGEYDWALQANIKAQKLCKNDPEGIKDLIQQHVKLQKQIEDLQGRTANKDPIKAFYENRAYTPRSLSAPIFTTSLNFVEKERDFRKINHEMANGGNQNLKVADEALKVDDCDCHPEFSPPSSQPPKHKGKQKSRNNESEKFSSSSPLTLPADLKNILEKQFSKSSRAAHQDFANIMKMLRSLIQDGYMALLEQRCRSAAQAFTELLNGLDPQKIKQLNLAMINYVLVVYGLAISLLGIGQPEELSEAENQFKRIIEHYPSEGLDCLAYCGIGKVYLKKNRFLEALNHFEKARTLIYRLPGVLTWPTSNVIIEESQPQKIKMLLEKFVEECKFPPVPDAICCYQKCHGYSKIQIYITDPDFKGFIRISCCQYCKIEFHMNCWKKLKTTTFNDKIDKDFLQGICLTPDCEGVISKIIIFSSGGEVKCEFEHKVIKEKVPPRPILKQKCSSLEKLRLKEDKKLKRKIQKKEAKKLAQERMEEDLRESNPPKNEEQKETVDNVQRCQFLDDRILQCIKQYADKIKSGIQNTAMLLKELLSWKVLSTEDYTTCFSSRNFLNEAVDYVIRHLIQENNRVKTRIFLHVLSELKEVEPKLAAWIQKLNSFGLDATGTFFSRYGASLKLLDFSIMTFLWNEKYGHKLDSIEGKQLDYFSEPASLKEARCLIWLLEEHRDKFPALHSALDEFFDIMDSRCTVLRKQDSGEAPFSSTKVKNKSKKKKPKDSKPMLVGSGTTSVTSNNEIITSSEDHSNRNSDSAGPFAVPDHLRQDVEEFEALYDQHSNEYVVRNKKLWDMNPKQKCSTLYDYFSQFLEEHGPLDMSNKMFSAEYEFFPEETRQILEKAGGLKPFLLGCPRFVVIDNCIALKKVASRLKKKRKKKNIKTKVEEISKAGEYVRVKLQLNPAAREFKPDVKSKPVSDSSSAPAFENVKPKPVSANSPKPACEDVKAKPVSDNSSRQVSEDGQPKGVSSNSPKPGSEDANYKRVSCNSPKPVLEDVKPTYWAQSHLVTGYCTYLPFQRFDITQTPPAYINVLPGLPQYTSIYTPLASLSPEYQLPRSVPVVPSFVANDRADKNAAAYFEGHHLNAENVAGHQIASETQILEGSLGISVKSHCSTGDAHTVLSESNRNDEHCGNSNNKCEVIPESTSAVTNIPHVQMVAIQVSWNIIHQEVNTEPYNPFEERQGEISRIEKEHQVLQDQLQEVYENYEQIKLKGLEETRDLEEKLKRHLEENKISKTELDWFLQDLEREIKKWQQEKKEIQERLKSLKKKIKKVSNASEMYTQKNDGKEKEHELHLDQSLEISNTLTNEKMKIEEYIKKGKEDYEESHQRAVAAEVSVLENWKESEVYKLQIMESQAEAFLKKLGLISRDPAAYPDMESDIRSWELFLSNVTKEIEKAKSQFEEQIKAIKNGSRLSELSKVQISELSFPACNTVHPELLPESSGHDGQGLVTSASDVTGNHAALHRDPSVFSAGDSPGEAPSALLPGPPPGQPEATQLTGPKRAGQAALSERSPVADRKQPVPPGRAARSSQSPKKPFNSIIEHLSVVFPCYNSTELAGFIKKVRSKNKNSLSGLSIDEIVQRVTEHILDEQKKKKPNPGKDKRTYEPSSATPVTRSSQGSPSVVVAPSPKTKGQKAEDVPVRIALGASSCEICHEVFKSKNVRVLKCGHKYHKGCFKQWLKGQSACPACQGRDLLTEESPSGRGWPSQNQELPSCSSR

SEQ ID NO: 292 - protein, 290 aa, Homo sapiens
MTKEEFTKMKQELEAEYLAIFKKTVAMHEVFLCRVAAHPILRRDLNFHVFLEYNQDLSVRGKNKKEKLEDFFKNMVKSADGVIVSGVKDVDDFFEHERTFLLEYHNRVKDASAKSDRMTRSHKSAADDYNRIGSSLYALGTQDSTDICKFFLKVSELFDKTRKIEARVSADEDLKLSDLLKYYLRESQAAKDLLYRRSRSLVDYENANKALDKARAKNKDVLQAETSQQLCCQKFEKISESAKQELIDFKTRRVAAFRKNLVELAELELKHAKGNLQLLQNCLAVLNGDT

SEQ ID NO: 293 - protein, 601 aa, Homo sapiens
MPSAKQRGSKGGHGAASPSEKGAHPSGGADDVAKKPPPAPQQPPPPPAPHPQQHPQQHPQNQAHGKGGHRGGGGGGGKSSSSSSASAAAAAAAASSSASCSRRLGRALNFLFYLALVAAAAFSGWCVHHVLEEVQQVRRSHQDFSRQREELGQGLQGVEQKVQSLQATFGTFESILRSSQHKQDLTEKAVKQGESEVSRISEVLQKLQNEILKDLSDGIHVVKDARERDFTSLENTVEERLTELTKSINDNIAIFTEVQKRSQKEINDMKAKVASLEESEGNKQDLKALKEAVKEIQTSAKSREWDMEALRSTLQTMESDIYTEVRELVSLKQEQQAFKEAADTERLALQALTEKLLRSEESVSRLPEEIRRLEEELRQLKSDSHGPKEDGGFRHSEAFEALQQKSQGLDSRLQHVEDGVLSMQVASARQTESLESLLSKSQEHEQRLAPAGALEGLGSSEADQDGLASTVRSLGETQLVLYGDVEELKRSVGELPSTVESLQKVQEQVHTLLSQDQAQAARLPPQDFLDRLSSLDNLKASVSQVEADLKMLRTAVDSLVAYSVKIETNENNLESAKGLLDDLRNDLDRLFVKVEKIHEKV

SEQ ID NO: 294 - protein, 445 aa, Homo sapiens
MREIVHIQAGQCGNQIGAKFWEVISDEHGIDPTGSYHGDSDLQLERINVYYNEAAGNKYVPRAILVDLEPGTMDSVRSGPFGQIFRPDNFVFGQSGAGNNWAKGHYTEGAELVDSVLDVVRKESESCDCLQGFQLTHSLGGGTGSGMGTLLISKIREEYPDRIMNTFSVMPSPKVSDTVVEPYNATLSVHQLVENTDETYSIDNEALYDICFRTLKLTTPTYGDLNHLVSATMSGVTTCLRFPGQLNADLRKLAVNMVPFPRLHFFMPGFAPLTSRGSQQYRALTVPELTQQMFDSKNMMAACDPRHGRYLTVAAIFRGRMSMKEVDEQMLNVQNKNSSYFVEWIPNNVKTAVCDIPPRGLKMSATFIGNSTAIQELFKRISEQFTAMFRRKAFLHWYTGEGMDEMEFTEAESNMNDLVSEYQQYQDATADEQGEFEEEEGEDEA
